United States Patent Application Publication US 2008/0274467 A1 - sequence listing, part 13

SEQ ID NO: 1607 - DNA, 171548 bp, Homo sapiens
tgagacagggtctcactctgtggcccaggctggagtgcagtgacatgatcttggctcaccgcaacctctgctgcccaggctcaggtgattctcccatctcagccttctgggtagctaggactacaggtgcatcctaccatgcccagctaatttttgtatttgtagtagagatggggtttcaccatgttgcccatgctggtctaaaattcctgggctcaagcgatctgcctgcctcagcctcccaaagtgttgggtttgcaggtgtgagccaccatgcctggcctttgctgcattacatgtaaatgaactaaacaaccaaaaggcagagattattgtaagactgaattaaaaaaaaatcaagaaccaattataaggtgtctacaagagatgcattttaaatgcaaagacacaaatagattaaaagtaaaaggatagaaaaatatgtagcatggaaaactggagaaaactggagtgattttattaagattaaacaaaatagacttcaataaagaagtattactagagacaaagacaaatacttcatactaataaaaaagtcaaatacatcagtaaaatggagcaattataaacgtatatgtgcctaattaacagagcttcaaaatgtgtgaagcaaacatctgacagaactaaagacagaaatagacaaatccacaatcattgttggaaacttaaacatacttctcaataatgaacagaacaactaagcaaaaagtcagtaacaatgaatgaaagtaaaagatctcctcttcttatactttccttagtctcttcctaaaccaagaagttcttacaaggtattgtttctggagaaggccagaaccatttgtcttcttctgtgcttccaaggccatatccacgtctgagatcctgcagtagttttattttcagttgcaagtaaccaaaagcttaattcaaacttccttatacaatagagggaaattattcttttaggtacagatcaatcagggttaaatttctctttaattttgcctcttgtgtgttggatttatttatttatttatttttttagacaagtcttgctttgtcacccaggctagtgtgcagtggtgcagtcgcagctcactgtaacctctgcctccggggatcaagtgattctcctgcctcagcctcccaagtagctgagattacaggtgtgcaccaccacgcccgactaatttttgtatttttagtagatacagggttttaccatgttgactaggcttgtctcaaacttctgacctcaggtgatttgcctgcctcagcctcccaaagtgctgggattacaggtgtgagccactgggcctgcccaatttcttcttttttgtttgctttttcttttttcttttgagacaaggtcttgctctgtcacccaggctggagtgcagtggcatgatcttggctcactacaacctccatctcccaggttcaggcaattctcatgcctcagcctcctaagtaactggcactgcaggcatacaccaacacgcctggctaatttttttgtatttttagtagagatgggattttgccatgttggccagtctggtcttgaactcctggcctttagtaatctccctgccttggtctcccaaagtgttgagattagaggcatgagccacagtgcctggcaattcttcaaaaacatttttttgtattgtaaagtcagagaaaatgtgttcgattcattctgaggtgaacatactatatggtggcaaagtgaggatagcagttctcccttcacatccacatcccacactacacagaaagaaagaaacatgtgttccagaattgtcagcaaaaatcctgaaattcgcacttgacttagaccacagacccatgactgatctaatcactgcaatgagggcaataagactttcttgggcgcagtacatgtcattcattttatccctgaaataatgggatagttgggggtagagtaacaataaatttccaatagaagtgtagactgttgggaaaggttaagtgggacatggataccagagcgttaaccaacaggcgaacaacaggtgaataatactgtgtttaacatggtctctctctgtctcgcacacacacacacacacacacacacagagcaatgagcagtaactagccaaacaaatgaaacattaatcatatacagcatatgttagagcaatatactcatatagaaaacaggaatttcattaaattacaaaactgttgtttgataaactagcgaggataaataatacataatattgtgatagtttttcttttatctttcctgtagaaagttatgtatgaaaaaagaacactgactttctcttgtactttaagtctttagcatttgggaaatttcctattattctcaagtatagtcacactacatcagatttcaagccaagacttaattttttaaaatgttctaagaggcatggtggcttatgcctataatcctagcactttgggagtccgagatggatggatcacttgaggtcaggagtttgagaccagcctggccaatatgatgaaaccccagctctactaaaaatacaaaaattagccaggtgtggtaacacatgctaatcccagctcctcaggaagctgacttgggaggatcccttgagccggggagggggttttgcagtgagccgagattgcgctactacactccagcttgggcaaaagagtaagaccctgtcttaaaaaagtaaataaataaaataaaatgttctaagagtgtttcatgctcatgactgcataagcattactgaacctggcattctgctcttgtctccttcattgttagattaatgttcacataaaaacatttccataattataccaataaagggttagacaccctctgtgagtataaaaggaaaattaagacataaagaaaatatgtggtaaagaggaaagggccaggttgagcaatgggtgataagtgcaagataaaactcattgaatataaaagttagaattactgagctcgaaaggatcccaagaggtcatctgatccagtctgccttctaagcaacagcacactttaaaattactgaaaactaacagttaattgtattctgtgtagcacttttttttttttggcttttgaaaaattgatcaaacagtagggataaagaaaaccctaattaattcttaattcaaagcttactgtattttgtggttctaaaatattttgaaaaggttttaaaatgtcaaatccctgccagatagaaagcagatattccaaaataaatattttactgttttctctgccagtgtgatatgagacaataatttattaccaggaaagctaagggaggcccttggaaccagcatcaaagtaataatcctgtttctctgagacttttggcagacagtttgttctttagttttcctagagattgttaagcacacaattcaaccaaaacactgacaattcaaattaattatatttatcaacaactgtcacatactttaggaaagtatattactcttctgcatatcctattgatctgttaacataattttgcacaacactatttgctctagcaactcaatttctgctactaaacgtttattctgaagaaataatcatagatgcaagcaaagatttatatacagttgtttattaaaacatttttgaccaagcgtggtgacccatgcctgtaatcccagcactttgggaggctgaggcaggtggattgcttgagcccaggagtttgagaccagcctaggcacgtggtgaaatcctatctctactaaaaatattttgaaaaatgtatctgggaatggtggcatgtgcctgtagtcccagctacttggagattgcttgagcctgggaggtggaggttgcagtgagcctagatcacaccactgcactcaggcctgagtgatggagcaagaccctgtctcagaaaaaaataaaataaaataacccaaccccccccccacatcatttgtaatgtccaaaattagaaaccacttaaatacccgacaatagaaaattggttaaataaattatggtgtgtctatacaacaaaatactacatagccattaaaattatgttatcaaatatccaaggtgatgggaaaatgtttatgatgtgtcattgggaaaaaattcaaaacataagcagtatgtatagcatgatcccatttctgaaaacagacaatatgattgaaaggaaatataccaaaatattagatagagttaaacctgggtggcagaagtttaatttaattaaaaaatgcaatacatgattgcatttttctctttctcctgtatcatatttattatagtgattatatgtcactttgatagaaaaaaattctatatttttaatgctgtaccttttagttttaggacacaaatagttaaaatagtcacagtttctatatattttgaaggatgtacatagatacatatatttatatttctttctcagtctacacataagtagactggccaccattaccaaaaattgttatatacattatttagaagtagttatatgtgctggtgcttgtatttctaattattctttcaatattttttcactatagtaatgtttttcatttttcagtagtgctttgagatgctttaacattgtttttctattagatgtggtgttgctacaggtatcaattcattctgagagagaaatactttctacccagcttgtcttctataacattataggcctccttggcacgactcatcaattccttactatgactcgaactcaaagatcattttaggagatttcatttaaaaaaagtctttaccctggatacaataattgtgttgactccaataaacagagctttctttttacaaggccatgtatcagtgctgcttgacagtggaattttcagtgaaggcttcctcttgtaaattgaaagcatatgcttgtacattaagagcacactattccagcgcactcacctgactccaccataagtagaccaggtgagatcatgaagaacattttagctgttctaaagagctataaaatagatttacttatgttccaaattgtctcaaagatattttagttgattcgtgccttccttccttcctccttgattagttcagttcaaagtcattaagaagggcagagtgaggtaggtcttgggcaggagtggcagcagcccagtctgagggattgcagccccagtggagtgaggagggcatctgtgtctgggtttgggtgtatcagtagcaacccagaattgggtttttaagccaaagaggggtgagaagagcacccatatgggggggggcagtgacagggagctcacacaggatgtcagagaccaagtggagtgaggaggtcacccatatgcatatgagattgagggattgtggtggcagcaccaatgggagatgagtagtttataggcaatggggaggggaaattagccagtaagtgaatatactgaggataaaggaagcctgatttctcactgtcagagaagaaaggtataaatatgaaaagggagtaaactagaatgaacctgtgttattggattcaaactagaggtatcagtgtaaactcatgattttcaaaatatatttggatatatagatatagaaataaagatgtcaatatgtattcaggtatacagtccagccctctacactcatgggttctgcatctgtggattaaagatatttttaaaaaatggatggctgcctctgtactgaatacatacagactcttttctttgtcattattcccaaaacagtacagtttaactaacaactatttacaaagcatttacactgtttactagtttgttctcacactgctatgaggaaatacctgagactgggtaatttataaagaaaagaggctaactggctcacggttccataggcccatgattccgtacaggtatggtgacatcagcttttggggaggcctcaggaaacttatgatcatggtggagggcaaagggagagcaaatacttcacctggccagagtaggaggaagagacagtggggaggtgcagtctatacactttaaacaaacagatctcatagtaactcacttagtacctatcatgagaacagcactgaggggattgtgctaagccattcacgaaggaccacccctatgatcacgttcacctctcacgaggccccacctccaacgctggggattacaattcgacattaaatttgatggggacacagaaccaaatcatatcacaccatattaggtattataagtaatctagggtatacaggaggatgtgtgtaggttatatgcagacactatgccattttatataagaatcttgagcatccatggattttggtatctggggaggggtcctggaaccaaggccccacagatactgagggatgaatctatatgtagatacatacatatattcctcagctctgtccactgagagggcctaggagtatctgcaacactccaatagccgtgagcacaccaggtacccagatataggtatttaaatatcacactccattaaaaggaaccagggctttctagagaaatggctgatctcaagacagtcacagggaaagtgatcctggaacatcttgtgccagaaagtgagaaagtgagcaaagaatgatgggatcaagtcaaaaggacatgggagtgagttaggtttaatgaggttttcattggtgaaatctgggacaatttagcttcaaaataaataatgacagtaacagattatatcccattgcataaactagtaacctacaagtccatactaatataaataaatacatggggagaagaaaaggtttctttcccttgcagtaggattccaactaataaatagaaggaatgtaggaattaggaaatcaccatttggcaaccaccaaagtaataattgagctaagaaatatcaatggatgataaaactggtaggtaaaattttgatatcaacatagtctcagcacacgtattccaccattgagaatgaactcctgttgggggggcccactgtggctaacagtaaaagcatatttatgtgtgcctgcagcgttactggttggtcatatgaaatttcctagtagccaaaaaaagcaaaagaaatagttaaatttaatagtatatttcatttaatccagttgtatctaaagtatcatcattcccacacataatcaatgtgaaaattgttagtgaaatatttatattcctttgttatacaacgtattcaaaatctggtgatattttatatttagagcgcatctcacttccaactagtcacattttaagtgctggggagccatgtgtggctagtggctaccttattgaactgtatagctctaaggtcttcagagtctgttcacaggagcaaaggggatcttggcaactcttttctgggtagtgtcagcattttctgtgcatcttgatgtcactgagggttaagagaagacttccctcatggtctttcttaagctctttaaagcagggattctttccctagggccttaggtacacattcactggcagctcccggagcttaaaggaacacatcagaaacattgtctaggattgggaggaagtagttatagtccatcctcgtgggttagacagagcattgtgaattggatttcggcaaagccgtgagattatctaaaggaattttggtaaaaaagcagtagcaaaatacaaaatttcatgatagaaaaacaagaaacagatgaatgtggcatggaagagagagtctggtagttttgggaacacagttggatcaggttccaagggatgaggtagacctagaaaattttgttgctcaggaacatttggaacagaaatgttgaatctggagttcacgttctcttagaagggccagaaatgggcttcaggggcctatagatctcctgaaactataagcaaaatgttgtgttacatgcatgttagggggtgatagattttcaaaggagagcattacccacaaatgactgagaatcctgccttatggattatatgacccttattaacttcaatagggatggcaccaggttcacaagactgaagaagagacatggagccagcaggtgaaacatagaatttatttgggaacttacagggcagtccagtggcagtgggctggtcagaagaacaaccatcactttaaaaaagcgtgctgtttatatagcatttttccttaacactccttcccccaaccccacctccttccacacaacctccacatggcaaccctcatatcataagtgaaattatgctgtcaggtgcatctgccatacagagtatgcttaagttaaattattgctgtcaggtgcatctgccatacatagggccaccaggtagaaagttaaaaatgagaattctcagccaggtgtggtagcttatgcttataatcccagcactttgggaggctgtaggtgggaggatcacttgagcctaggagttcaaggccagcctatacaacaaggtgaaacccctgtctctatttaaaaaaaaatttttttaaacagtgagaactgtcacttgttcaaagccaggagagacctcgggcctctgaatcaaatctcactcttcagtggaaaaaaatgaaatacagagatgtcgagttactgggccaagcaaggcttttcactgacaacgtagtgactgacatacagaaatacaatatttagggacactagaggacctctaagactcagaaaaattaggcattctggaccacagaaaaacccacttaaagaattcttgaaatctttgatcatcccgagtggatgtgatctttctttctttgctctgccagagcacctggtttgtatcacacagagagcaccacactaataacactcagagtttctcaccttggcgctgttgacatttcatgtaggataattcttcgttgtcggggggctgctctgtgcattgtgggatgtttagcagcatccgtggtctctacccactagatgccattagcaccatttccatcactgtacccacagttgtgacaatgataattgcatttagacactgccaaatgggggagaagggggaacaaaatcactcctgattaagttccactgccttataccaaagctattttaacatatctcagaattctaattgaatcttgcattggcacaggccacgcctcacacagcttgaagcaatcacagtatgtgtaatatgctggataaataaatgttcagtttttgtgttcatggattctgcatgccacataagctatttccaaataaacaatgggtgaatggtttcaaaagagaagaaaatcaaaaaggaaacatttcattccacttgctcttttaggagctcctgagttctgcatcagaaacaagttgagccttgtattttcttttttgagcagtaaaatacaggttgtcatcttctcctgcacgatacggaagaatacaattagaatattactcaaatgaagttttcctttagcttcacacaatgcactccatttagaattcgttcacaaagagaacatttccccctacttccttcatattcttttaacagggagtttttaaaaggtccaacactcaaaattaaaaaaaaaaatgtatccctcttaattgttacctctgaaaataagcacggtggaaaataatttttaaaaacctactttccaaaaaaaattaaactgtgctcttatgaagtatttcaactcaagtcgacgagcccaaagatctttctttaacacctcctccccacagtgctttatattgtgtggttcttatggtagacatatacgcaaagaatataaatagagaggaaatacatttcaagccaaatcttagatgtaggcaaatcaactccacatgatttcaatcttggagtcttaaccagatggaaatggtttcccaggagacagagctgcggggcaggggctagaagcagcagcctggacgtgcaccaatgattacgcacgggctgcgtataaaaagtccccgagggaaggaaagccgaaactccatcctgagggatgctgcggcgagagaatctccaactcatggaggctgagcttctgcgggagaggccacagcctgaagaagaggtgggatcggaaataaacccgcctgggagacctgcaggcaccagcaggtcattctcatttgtttattatatttaataagcgttttagtttggaatgatctgaaatgatttaaaattgcaaagcgagcgagttcagagagttcccttatacctctcacccagtttccctcattgttaatatcttacattatcatggaatatttgccaaagctaaaacattgacattggcattgtattaatttatgagacacggttttgctctgtcgcccaggctggagtgcagtggcacgatctcggctcactgcaacctctgcctcccgggttcaagcgattttcctgcctcagcctcctgaggcagctactcaggctaccactacagacgcataccaccatgcctggctaatttttgtattttcagtagagatgggatttccacatggtggccaggctgctcttgaactccagggctcaagcagtcctcccacctcagcctcccaaagtgctgggattacaggggtgagccaccgtgcctggccggcatattattatttatttttaaagagttaaacgatttcctttaatagaaaaacattcaacacgtttgttcgaagtttcatatgtttggggtgtaagctagtggttcttaagagcatagaaaaattcttcctgagggcagtttattagatgctcctgttgcttccatgctaaagaacaaaccccacaggaaggcctgtttcccaacatttggagtagttctttgtctcccaaaattccagttataacacctgtaagggtatgtggcatttcagagggagtttgctgcttgtaagatagcagggtgggaaggggaatttccctaggactttgcctgtggttttccttggggtgccaggttaaaatctgaagaatggagggtctcggggcctccatctggccatgccacaggggcttgtggcagcccactttcttccctcttcagaaaaatcctgggcttggctcaaggaggcagatgtcatctggtcctcaaagaccaattgtgcagctgatggagcccctggggtaggatccaggttggaggctaccccaccccttgtagaagggcaaaaatctcagatctcaatgacttattttagtgagaattccctcttttattagtatttgctataaaaaataagctccacccacacttgtgtgtctaagaatcacccagggaagttgctgacaggcagatgcctaaacccagatttggtgggtctgggttaggtcctggagatgtgtgtttctaacaagcatcccagatgattctgattcaaatagatggcacttaagtcagatacactgtttaattagtctgcttattctagattaactactagaatttggatttctgtcagctgggggtatctttttagcattctccagaggggctctttaattcagaatgttatgcatcttgttttgttgtcattcattgacagtaagtgaaaacatataatgtgagaactaagtaaaatttgctaaacacttaagcatgaatgtatatgtcacaacttatagacagtgtcattccagtgataaatctccatttttctctctcacgtgcagccaagttgtagtgtctgattctcatagtcggtacctatgcaaggaatataaatagagagggaaagcatttcacgccaaatcttaatgtaggcaaatcatctgctctgggtcttgttcccttcagggacctggctcctggctttttgctggttttccaggatctatgttgtctatttatcattttatatactgtaggtgagcctgtcctaaaataatcatccttttgagttttctaatatcaattgccacttttcactttagtattcagagactcaaatctgggaccccgttctgagtgacagcaagtgcgtggacacacacattcttgaagatactgcttttcacttcacattgttctactcagcgtctccactgctcccagcgtctctgctgtgcctcttctggacatatagaagtgatgtattcttcatagtctaagagccccagcaatatttatagcaatctttaatttccacttagtaagtattttgaacttatgaaattcctgtaagtgaattttaggtcatgccacgtgtactccaccttctgaagtctgcccgtgatgaccttctttcaggtacaataggtacaatttgtctagtgtagattgtctaatcttgattaatatagattttcttcagttcagaaatacaatttaaatgccattaaaaacttaatttttgactgacttttcttgtgtttcttatttaatagaaagcctcaatttctagtaaagccatccagtctttcagttactcagtgtgctggcctgtggaaactgaagaactataaatatgctccaattcacatcagtctggtgtttctgaagttgccctgtttctacgtttcaaatcccatgtggtttttttcatttagaatataattccagataccaattattttatctgatttcataaatcccagtaacttctttttctgtctatttggcctgtttcttccttcattccagacatagttatctaatgacttagttatctaatgaccacagggtgtggttttacaatcaagtccagttcttgcatctgtgcctgagtttgggggcctgtaggacttgcaattttaattggtggcaaggaagtatgcagttcatgcatgtggcttgaataataagattttgctctcctttttctcatataatatctaagtaactgtctttcttgctattgtagctttctccaggccaatctgtcactctgtggtttctggttttgctcttcattctcccaagaatcactgtagcatttaagaaactttactgaagacttgaaaataaggtcaaagacctgcaatgcagaaaggaaagtctgtgcctgagttgtcctcagatcccattgctcctgaaacctttcagtcatggccttttcataggacgatccctggtcatccttctacccaccttctcccactcccaccagtgtctccaagttactggctgtcttagtttgtttcagctgctgtaccaaaaataccataagctaggtggcttgtaaacaacttttactcctcacagtgctggaggctgggaagtccaagatcagggcactgatgaattcagtgtctagtgagggcctgcttcctggtttgtagacagccatcatcttgctgtgttctccaatgggagaagggacaaggcaactctctgggatctcttgtaagaaggatactgattccactcatgatagttctgccctaatgacctaaccatctcccaaaagccccacctcctaatacatcaccctggtagttaggtttcaacgtaagaattttgaggggacattcagaccatagcactgggtcggcctcccacttgaacaaacagttcccttgactctctccatcataaagcccacaactccatcattatttcttagctatagccgtaggagaattggagttaagctcacgataatctctaggcacagggccagaatgagagtaaggcaatgatgcatgaggccacaagttttaacggaacaccaaaagagttaacaattaagagcaataatatgttaatgcaatattttaaaaattaaaattaatgctaaaatcgataataaaatagcaatagtttaaataaaaacaggctgtttgttttgcaactctgcatttttgtgcaataaagcatagttgttgattagctcaaggttcctgagcccacagagctaggcgggttgataaggggtgatgatggtgtgtgaacagattggacaatataatgctttatatttagtcatatttttgaatggcagaacttttactttttctatttggttcaaaatatgggggagggtactttgtgtgtatgtgtgtgtgtatatatatatacacacaagattttgctctcctttttctcatataatatctaagtaactgtctttcttgctattgtgtgtgtgtatatatatatatatagctactatatatatatacagctactatatatatgtgtatatatatatatagctactatatatatgtgtgtgtgtgtgtgtgtatatatatatatatatatatatatatatatatacaggggtacatatttatccttttgcctcaggctccaacatgacattgcacaccagtgttctatccacaatgagaggaggtttttatattatcatcagagcaggattctgggcctgttatgcacaattaaaatctattagtgtcccctccacctgcaaaagaagtcttcccccaaaatggagtctgccacctttatagtaatataaattatgcagcttttcaaaaattgtgaaaaacacatatttacaatcttaaccatttctaagtgtaatgtgtaatgttaagtacattcacattattgtgcaaccaatctccagaatacttttcatcttacaaaactgaaactgcccaccaaacaactccccattctctcatccccacaaccattctacttggcactggcaataccattctactttctatctctatgaatttgactactttaggatgctcacataagtggagtcatacagtgtttgccctttgactggcttatttaacttagcataatggcttcaaggttcatccatgttgcagcaagtatcagaatttctttccttttcaaggttgaataatccattgtatataccatattttgttcattcctccatcaatggacatttgggtggtttacaccttttggcaatcgtgaatagtgctactaggaacacaggtgtacaaatatctcttcactggcagcttttgaagatcacagaatcatatctcacaaaatccattccaccaatgattacttgtgaattggatttctgctctgcactctttgtggtaagaggaattttctgcaagcttctggctctttggtggcaaaagccattcctagattgaagtgcagaagtcattagaatctttaacactccacctgatttgcaactgtggttactctttaatcatttcttgcccacttccatgaaggctacactttcctatacaacatcatatttaatctttctttataacaaatctgtgacattgatgttataattcccattttatagtcaaagaaactgagtctcagggaagataagtgacttacctagttaataacccattgggacctaacatataaggatctagtaagtacaaataagctagcactgtccacatagactgtgagttttgctaaatctataaatctttctatttgagcaaaataaatgtaagaagttttcagaattcataactctacttaccaatttccaaaaggggcagtttccaaattattttatatagaaggagatgctacagccttccttaggcactcaatctagtgacctatgactaacatacctctgggaggaaaaaatcatcttaatacagattagtttaataagacaataagacagcctgatacagaaattaaaactagggtatggaggttaaagtttggcatattggcttctgcactgacagacattttactttcatgctattctgatggtccttgcctaatgaccacagagcgtgtgtgtgtgtgtgtgtgtgtgtgtgtgtgtgtatgtatgtatgtgtctgtctgtctatcagtgctatctaacagttttctgcaatgatggaaatactttttgattgtccaatgaagtagccactagtcacatgtggcaactgagcacttgagtggtgactagtataaaagggaaaatcaaatttttaattttatttaattaatttatatttaaacaaccacatgtagttataacaacagaatattggacaacgtgggggctatagaatgggtgtaacaatgttgtatttcagttcttctaccagttcttcggattcgttttcttgaacagagtccaagatggaatattttaccatgaattctgggttggaataggtaggattacagtgaaactctagcatttagtcacatgaataaaagctgaatgaggacaaagcatttcaaagaaggatcatatgtctacaaagaaagataatctggcccaataaaccaggtaaattgtgtgttttggaacgctctagtgtattttattgctaacgcccatttagtgaatggattgattttcctgttagaatgtagtgggaacataatctgaatgcctttgactctgaagcctactgcagctaacaagaacatcatttgtatttcattggcccagacagattatgattaatggttggatgaacacattttcagttgaatttatgtagcacagtgcttcccataatttttttcctgtcaaggaactattttatgttaaattacacaaatatagttttatttttataacattacttccttctatctctgaacacctgcaccttctctcacaatgtcaacctctctctttgtattgcaatttggcttctgtatctactctgttcttttttcccaccttcccccgccccctgagacaaagtctcactctgtggcccaggctggagtgcagtggtgcaatcttggctcactgcagccccgacctcccaagctcaagtgatcctcccacctcagcctttgggttgctgggaccacagatgcacaccaccatgcctagctaatttcttgtatttttagtggagacaagatttcgctattttgcccaggctggtcttgaactcctgggctcaagcaattcttctgcctcagctccctaaagtgctaggattgctggtgtgagccaccatacccagcttgtttcttttattctcagaatattcttaatattctcaagaacattcttggcctcccttccctgccatttataatgtttcctcccttggtttctttattttccttcattcacactctgattgcaccattcagtttgactcaattgtagtcaaattcaactcacaggcttgttaaccctagtttggtgaacatcataagtctttcagatgctggttggaaatgcacctcctcaatccctaacactgacatttaagcagcagaaagaagaggagcagcccatggtgaaggcaactggaaaggtcagagacccaaggggagataagatgaaagttatcagtggtgcctaatgaagaagaactgttctgtgagacaaggactgagaatgttcctcatgaggacatcatcgatgaccttggtgagaacagtcagcagaagtttgagaaattattgggaggtgctgaagctgccacaagtacagaccaagcttctgagagagttggatgatgacagaaggagaaagtgaaaaagggctcagggtagagaggcttttgtttaggatgggagaagctagagcaagccaatgtcagctggggcctccctggctctgtgagatgttggtccatctttgtaaacctggtccaaagccacagtccaagattccttttatgatttccctaaatttctgaggcttgctccctcatgcttctctttgtgtcccctgccacatctgtacctgtggtttcagatccatcttgtggcaccacagtgcgaatctcagccttctcaccagtttctacacaaacactcatgttaatggtaatctattgagttaacaatttaacaaggaactttaaggtagtttggaggtgctcctggagaggggttatacgcccaaccacactgccctctgccatcctgctggctcctcctccgtttttcccaacttcctcctcctttagagcaaggaattacttttcttgtctagaactgagtgatcaacccagagtcaaggtctcgccttcaacctcaatgggcttatccatgaatttttctaagaaatctccaaaaggaattttcatgccatttgctaagagaattcgattctcctctaatatgtcctcttgtcatattagcattcgggggtgggggcggggcaaacagtttatgtagacacagaaattgatgcatgtggtgaaatgctgggagacacctggaggggagaggagggcagctgttctatttcttgtgattggtgggacaggaagcaagaatgagtgaaaatgaagataaacctgtatgggggcaggatgtgtatgggggtgggatggaagagtgaagatttgagggtttgtgggctcagtagtctctgtgggggcaagatcacttgctgacaggggatggacagaactgaaggtatgagattctcgctatagagaggagtgagggaaggagaagggatgaggggagagatgctgtttttagataaggagaagtattgacaagatgaatggagtattcttctgaaatcggaaagtatacctttgtgaagataccagttcccacggttgtacttctctctagaagccccaaatcactaagatatagaagcagagaagggggatttcaggattaatctggggttggagcttgcagagcaggacagtgtgagttctagtgctttattctgaagtcctggtgaaaaagggaaaattgagtaggaagaagcctgcccattagcactgggttgacattcagctccactctggaccatgttaccttggtgataatgaaagtggaaggagggatgcttttctgccaattttatctaagcgtcttgggcagttttaatttaaacgtatgatactacctccattttttcctggtatgattcctttcatttaattaggctctattggtggaaagtagttgatctttgatgacgttgttatctcctgaacattattatatctcccgctctggtttacaggtttttcctgactcttctcttctgcattacagctcaggactgccacccagtggcctgttagcatagagctctggaaatgctgatttttttctttaatacagccgcagaataagacaataagaaaatatttgcttccttgttggggaaagtaaaatgcagaacttcctatttaccagccaaacaaaagaagaatgcattctctcaggacctcagggactgtcagaaaataagaaaagcttttttgaccttagtaacctttgacatggttctctgagaccaagtgtgtttagccaggaatttatactaaacagggaatggaatgaaagcaggatcaggattttgaagaaaaatacctctcaaattggggagagttaggcaaagagattctgaatgtaaagtcatttggggaagacataggcccttggataaagcatactttttttgttttcctattttactttcttcctcaccctttaacacatggaagatgggtccctgtgtcctccaggtctgataggagttgtcagactgccgttgtttgagttactttatttatttggaatttctggatgtgagaagctatggaagccaagttcagattcagccattctaattctcttataagatatcctctgtgaaacagtggtgtacatttcagttttgtttttgtaaaaattgagtatcaaaattttaaaatcctacatgttttattatcaaaagatcacttacaggcataaactctagtataatttttaattttttgaattgtagattgtctttttcttttttatcatagacactctgaaagctaattgggatgacagagaagaaaaagggaaaagaaagaatctcgaataagaggcccagtggcctcactagaaggatgagaagataagacttgctctagaggaggaaaaatggcagcttccttgcccactaaggggagacacagagacccttgaatgcaatgtagagtgtccttccttagcccttatagcggttcttcaaagttgcaactgttcctacaaatgttatttacagcctgggacttcattaagccagaatatttccctgaacactactagagatgtgctctgtaatattagcaaggtcttgctgataccaagggagggaaagtaggtgaatatctgtgcatggctctggaggcatacctagggcagtgtgggtggagtgccaggctctgttaaggattcccagtgggtcagccacaagcatatggagtgatggctcctgaacaaagactgggcagaaaagtgggcagaagggaatgccagaaattggagacagagataagatactaaacacaaacttttccacttcctaattttgtctaagataagaagattctaaaaacaaacttttccactttctcattttgtctaagtccagccctgcttgcatccaatggaagataaaagattaaaactagagattattttcaacaagcatgaattgaggacctactataattggtttattgagcaatcttgcttcactggacaatgaaagtaggaagacattattttttcctgtcattgcttttacctgggctctgcaaaatatccttttcctgacacttaatgaaatcttggggagatttaataatgtcaggatcagtttggttattaaacatcattttgtttaaaactccaatcatatcctattcaagtttcaaatattaccttacctcactcctgctccaggtactaggtcacaaagaaagtctttaaagtcaaaatgtttaagaatctaagttatatgaaccatattatctggctatattgtaataatcatataagaaataagagacttaacttacctatactgttataggttaaaaaaaattgtgaggcatttacattaacagtgaagaagggaaacattgatattttcttttcataaaaacaccacactacttcttttagcatctgagatagaaacagaagctaataaatagggaaagagtttttgatttttaactttgtatttgatatactaaaatagcagcccataagttcaaaccccatgtgtttcatttttattctgatataataatttgaatagagaaaattcttaaagtatcttaaatgctcatttttccctcaaatatctcatataacatggtgctcagaataaggtgaaatgcaatatgttgctgtttgtagcagcacggtttctattttaatggctgatgatttaaaattttattttaaaatttatatatgcatatatctatattaaaatataagattattttatattttattttaaaatcatcttctaagatcaaaaacaatttggtttgaaatgacagtacaaggaatgtgcatcagtgcctccatgtcaacctgctgacactgaacgttcagttttattctgcaaccttctgcaagctaatttatacagcatccaaagctaaggcgaaaatcaggcctggagttagaactcactggatgtcaatctggtttctgatggataacagaggctgaggacataaaatagtccgagtgttatttatgctattcagctagatatgtttcattgaaagcaacttgttttaaaatgtctatgagcttggagttgtatttatattgcatcagatccacaaaggtgtgcagtttctggctggcactgatctgttgacatgtccttggcataacacacttgaaaagttacaacagactgcttttttctccatgttgttggttttcagaaacttataaataactgaccaaatcttctaaattagaagtagttggatactagcaatggttcaaaacttcctacagggaagtccaactgagtatacttggaatgttgttgtgacacagcctgaatacaggcactaagtttctgtatatgaggcctagcattaaactcagatttgtagggaaagtctgattcatggcatggaaattggaaaagaccttatactgttgtaggtcttgctgggaatatctgcaaggcatggcctgattagaactccaatctgtaagctgccatttacttgctatgcctcattttatgacccagttgctgctacttcatctcatgaatttgttggtgctaaagctattggggtggttataactaccctgtagcttgagttgagaaccaaggaatgttactgcttatgacctgaatacacgaaggtagacttgtaaaataatcttggatataagttaggattttatctgttatgcctagtagataaaatccttaccagaaagtcagatctgaagttcctcattctgctgattgtatttgatatcttcaaaatcaatgtttaagtttttcctagtcttgtattaggtcattattattattatatggaaggaaacttgcaggatctccacaaagtgtcaggttcatttgctgagatggatcaatagattcatgtttgaagacattgcctttttgcatttggcacaatattatcttgctgattactggcttcactcatagatgcatttaaaaagctctttcaaagggtgcagtatttgaaacaggataaaacgcccagactcattttgttgcatcatagccctcagaagggaagtaggattaatggaatccttattttgagctaatttggtagcagagtattttccagtagtgctactattagtcctcattagtaagagttccatcatgacagggaaagggctgattatctcatccatcacggcttctccagcagtaaacataataaaagataatttctattttatttttataaatgctctgttccttcttcatttcagagatgtcttgagttgcactgatacaatctagcctgccattttaaaaacaaaggttgtgtttaactgaacccaggtccattgctttttttttttttttggtagaaagcctgtatatgttcaggcctgtttcttcaggcttactcatctgaacacagtttttgactcaacaaagtgtattagcagccagatcccccatgcacacaattttgcttcagcatatcccagaacaacttttctttttggcatcccaaactgtaggtgtaaaatctagtttgtgtttagttttagagttgttttttgtttgtttgttttttgtttgtttgttttttgtttgttttttgtttgttttttgtttgtttgtttttggtgtaggtttcaatatgaatggaggtttaggtatggctggatcaactactgtacaaaagccaagggaagtggaagattcatctttgcctttcttgtctgtccattaggatactttaaccactcttgggaatttatggccaggaagtctattcagcagacttcctaattggcagaggaagcacatttccataaaagaagagtttctggaggaagctagcagctccattagttctgttggaagacagtgcacttgaaaggtgttttttgttttcttgtttgtttgagacggagttttgctcttgttgcccaggctacagtgcaatggcacaatctctgctcactgcaacctccacctcccgggttcaagcgattctcctgccttagcctcctgagtagctgggattacctgggccatgcctagtgtggccgaagccgagttctgactttggcgcggttcagttcatacatctctgatgttgacatcagaagcagaaacgccggagaatattgtatagtagaaacacaaaagatttatagggataactaacaccaagccattcggagcctgatatgtgaagtttccttccgtgttcaggctttctgagttttgctctatggtattctggcctctatttctgttagctgggaaggattttaatgtaacgttaagaaaactcttttctcaggtgtgtgatactgagcctataaactgtttgtgcagcttattaataaaatcttgtggaaaaggtgtcatgctatccaaacaggcaaattctgtaataggagagtctctgacgcctgaaatattatagtttgctttgactccctcagactggtttggtgtgatattttctgcaactggcatgtacacgcctgcacctggggcggtggggtccctgcgggctgcaggctccgggttgccgcggagacgcgtctgctttccctcggtcttcgcggggcgggtggggggaggccagggtgcctggaggcctgaacacatccaacagctccagcaggctgagggcgagcccaagctggggctgaggacagtagagctgaacgaagacgcacctgagacggtctacaccagcggtgtcgctgcccgaaagtgagagaaggctgatattgctagctggaatccaggcctgggtgctgcatggtggcgcccctccccgtgaccaccgctgcgttttctcggggtgagaaaggcgcccccaccatgcccctgcccctggacttctggcctaagaagctccagcgtccgctacctccctgggagggagtggggtgggggtggtggggagcaggacatgttctggattctcaggccgccccctgcatgttccattgacttttagtatgggacatggagatattaagcggcatctcagagaatctcctgggtttagacacagacttccctagccctgttgtttagtagcaatctaatttcccttttgtaatcaggatctatggctgcagcaattgagtactgttctttgtttcagtggcaggagaagccccaaaaggccaggtgcttgtttcagctgccaattcaagggctccattgttgttggcactaagacacacagccagcagggctcagagttgggacgggaagcaaaagtcctgcaattgagttgttagctatggaataataaggggaatcacctcacaaccattccttgatcctgggctggtggaagaaacagtacccatgtatcaatccctctctccctgtctccctctctccctctggcattctgtaagatagaatctatccttttagggtgttgtcccctaattggtaccatctgtagctgagtttttggtaagcctcttaccagcttgttaccatgacccacatgtttcgtggtcatgggttacctggtaaggccagtgaatttctagggaatcagtccatcagttttgtgagtgcagatggtgctggctagtacatattctggcagggagagctaatccatattcagaatagtgtctattccaaggaggacaaatcagttctccttctatgatgtaaggggcctgatgtaatcaatctgtcaccaggtggttggctgatgttcccgggggaatggtgctatattggagactcagctttggtctctgctgttggaagatcccacatctggtaatgttggtagcaggcctcagagaggggaactcacattattgatccctgccagtatggccactttgcatttgggaaagaggctgactgaaggaatgtgatttttgttttttctttgagacagagtttcactcttgctgcccaggctggagtgcaatggcatgatctcggctcactgcaacctctgcctactgggttcaagcaattctcctgcctcagcctcccgagtagctgggattacagacgtgtgccaccatacccgactaatttttgtattttgagtagagacagggtttcaccatgttggccaggctggtcttgagctcctgacctcaggtgatccgcccacctcagcctcccaaagtgctgggattataggcgtaagccaccatgcccagccaggaatgtgatttttatctacctgtaggggttgccctttagtgagcacgcacatgaggacgcagatatccacatcatccatatacctctttggaggcattcctattaaagccaaaaataagacaaacacacctgctatccccatgtcagtcaacattgtagagagaatttggttaatgtagtgagacctgaaaaagaaatagacctgaaaaaccagtgtctactatagacactggttgcttgagctcataggacttgctcagaagccttatgaaatgtatctcagaactgtctgcataggggaataaaggggaaagcacttttccacttgctcctattccccatctgtcaaggatttcctcatcaagcattaactctccctcccctaccccacttctgggttgtctctgagtgctgctgagcaaatttccaggacaggaacaatttccaggacacagtgaggttaccatcaggttgcacctgggtggcaaagaggtcagaagtggtgagcaagacatatccaatatcaagtgtataataataaggaagagaataaactaatttacataaacatgattattagaaaatccaaagaatattataaacagaattaataagaggcctcaacagcatttctagattgaccaatgtacaaaaatccatagtggttttgtatattgattagaaaaggcaatcaaagtctaggtgcggtcactcacgcctgtaatcccagcactttgggagactgaggtgggcgatcacttgaggccaggagttcaagaccatcctggtcaacatgatgaaaccccgtctctactaaaaaagcaaaaaattacccgggcagggtgcaggccttgcaggcctgtaatcccagctactcgggaggctgaggcacaagaatgagcctgaggggaaggctgcagtgagctgtgattgcgccactacactccagtctgggcaacagagggagactctgtctccaaaacaaagcaagaaaaaacaaacaagacacaaaccttaaaactccccaaactcctattcctgaggcaaataggcaagatactaaagtatgataaaacacaatggaggttcagggatgttcgttgcattatattcttttttcttttttctttttgagacggagtctcactctgtcgcccaggctggagggcagtggtgtggtctcggctggctgcaagttccgcctcccaggttccggccagtctcctgcctcagcctccctagtagctggcgcccgccaccacgcttggctaattttttgtatttttttagtagagacagggtttcaccatgttagccaggatggtctcgatctcctgacgtcgtgatccgcccatctcggactcccaaagtgctgggattacaggcgtaagccacgcgcctggcctcgttgcattattttctacattcatctttatgtacaaaaaaacttaagtccggttaaggctgattggtttaatctgaattctgactttatttctctgtgagaatttgagctttgttctcccttgtgtgcgatctttattctctagtctgtttctgtggtcacaagatggctgccagtaacatatggggcttcatgcatccttgttcacatccagagacagacctctcagagctattgtgaaaattttttgagcttctcagagtatcttgggtcaggtgcgcacttctacattaatcctgggggctgggggaattccatgccctgactagcttgggcaggactgttaaattaatcaatatggcaagggggatgggactaccctgattggctgaggaggttgtcagtcccattaaaaccacatagctactacacaatggtgacagacggaaagagtattgggagggtcgggtgcggtggctcaggcctgaaatcccaactctttgggaggccaagagggtggacagtttgagcccaggagctcaagaccagcttgggcaacatggtgaaaccccaactccattaaaaaatacaaaagttagccgggtgtggtggtacacaccagtagtcccagctactcgggaggctgaggtgggaggatcgcttgagcctgcgagggggaggttgcagtgagctgagatcgcaccagtgcactccaacctgggtgacagagcgagactcagagggtctcaaaaaaaaaaaaaaaggtattaggagacaatgactatgtatgtaggtatagtttttcttgtttacatatgaatttgagaccatgttatatgtatggctaaaatatatttagaattttttgtttagagcaggattatttgtatcaataatggtttctaaaaacctggattcaaccgaaatagttaactaaaagggaacaaaaatgtgggctattacgcaggtattaataatgacaaattgtagacttagctttttcaaagcttgccaatgacttggcagtgaagtaaataataaaaagtcatgttgatgtgatttttctgtccagtaacctcagataataatttaaagccacctttaatatggcttcctgatgaaaaagtgaatgctttgggcaaggaaaacagtattcagtgattcagtgggtgctttattagatgtagtcacaactccattattccctttcatggttctcatgttttcaacatcatgaatgtttcagaactttttttgtattctgattatgtcatttttttatttgtcctcttggtcctataattcccccctgcatcagaacattagaatctacctactctactaggaagtagtctcaacaagttgaaaacatgagtggaaaaaagtcatgtgccaatgaaagtggggaaggagttagtttgttaatttccaaggtactaatttaaaaaaaagttgtaaaatacttataaatgttattttaaccctttttgagtgtgaaatttggtagaattaactatatttacattgttgtgcaaccatcactacacgccatctccaaaacatttttattatcccaaactgaaactccctgttctcccaccctggtaaccactattatattttctttctctaccaatttgattcttctagatacctcatttaagtgggaccatataatatttactcttttgtctagcttatttcatttagtataaagttttcaagatttaaccatgttgtagctcataattattgataggtaagaacttacttttaccttttttaaatttattttctgtacatcatagctttgtttcccattccttctgttactacctttctttgtctttattttttctgagctgactcattttgattaccttttcatttcatttgtgtgttttctatagataatttctttgtgatcactatggggattacatgtaatatcctaaagttataatgatctactttgaattgataatttaacttcagtcatatacaaaaactatattcctatacaatttcatcccacctttatgttactgatatcacaaattacatctttatacattgtatacccattaatatagatttataattaatttttatgcatttggcttttaaatcctgtagagaataaaaagtggtgttacaaaccaaaattacaataagactgatttttttcaaacccttggtcagtttgaaaaattttaaattttattttattttactttaagttctgggatacatgtgcagaacatgcaggttggctacataggtatgcatgtgccatggtggtttgctgcatctatcaacccatcatctaggttttaagtcccacatgcattaggtatttgtcctaatactttcactccccttgcaccccaccccccaacaggccttggtgtgtgatgttcccctcccttcctccatgtgttctcacttttcaactcccacttatgagtgagaacatgctgtgtttagttttctgttcctgtgttactttgccgagaatgatggtttccagcttcatccatgtccctgcaaaggacatgaattcattcttttttatggctgtgtagtattccacggtgtatatgtgccacattttcttaatccagtctatcactgatgggcatttgggttggttctaagtctttgctattgtaaatagtgctgcaataaacatacatgtacatgtgtctttatagtagaatgatttgtaaacctttgtgtatatacctggtaacaggattgctgggtcaaatggtatttctgattctagatccttgaggaatcaccacactgtcttccacaatggttgaactaatttatactcccaccaacagtgtaaaaacattcctatttctccacagcctcgccagcatctgttgtttcctgaattttaaatgatcatcattctaactggtgtgagatggtatctcattgtggttttgatttgcatttctctaatgaccagtgatgatgagctttttaaaaatatgtttgttggctgcataaatgtcttcttttgaaaagcgtctgttcacatcctccatccactttttgatgggattgtttgtttttttcttgttaagttccttgtttagacatttgtcaaatgggtagattgcaaatttctctcctattctgtaggttgcctgttcactctgatgatagtttcttttgctgagaagaagctccttagtttaattagatcccatttgtcaattttggcttttgtcacagttgcctttggcatttgagtcaggaagtctttgcccatgcctatgtcctgaagggtattgcctaggttttcttctattgtttttatggttttgggttttacatgtaaatctttaatccatcttgagttagttttcatataaggtgtaaggaaggggtccagtttgtgttttctgcatatggctagccagttttcccagcactgtttattaaatagggactcctttccccactgcttgtttttgtcaggtttgtcaaagatcagatggttgtagttgtgtggtgttatttctgaggtctctgttctgttccattggtctatatatatgttttgataccagtaccatgctgttttggttactgtagtcttgtagtatagtttgaagtcaggtagtgtgatgcctccagctttgttcttttttgcttaggattgtcttggctatatgggctcttttggttccatatgaaattgaatgtagttttttctaattctgcaaaggaagtcaatggtagcttgatgcgaatagcattgaatctataaattactttgggctgtatggccattgtcacaatattgattcttcttatccatgagcatggaatgtttttccatttgtttgtttactctcttatttccttgagcagtggtttgtggttctccttgaagaggtccttcatgtcccttgtaagttatattcttaggtactttattctctttgtagcaattgtgaatgggagttcactcatgatttggctctctgctggtctgttcttggtgtatgcttgtgatttctgcacattaactttgtatcctgagactttgttgaagttgcttatcagcttaaggagattttgggctgagacgatggagttttctaaatacacaatcatgtcatctgcaaacagagacaattttacttcctctcttcctatttgaatacactttatttctctctcttgcctgattgccctggccagaacttccaatactatgttgaataggagtggtgagagagggcgtccttgtcttgtaccagttttcaaagggaatgcttcagcttttgcccattcagtatgatattggctacagacttatcataaatagctcttattattttgagatgttccatcaatacccagtttattgagagtttttagcatgaagggatgttgaattttatcaaagccatttgctgtatctattgagataatcatgtggttttgtcattggttgtgtttatgcaatggattatgtttattgatttgtgcatgttgaaccagccttgtgtcccagggatgaagccgacttgatcatggtggataagctttttgatggctgctggattaggtttgccagtattttattgaggatattcacatcaatgttcatcagggatattggcctataattttctttttttgttgtatgtcttccaggtgatggtatcaggatgatgctggccttataaaatgagtaagggaggagtccttctttttctattgtttgggatagtttcagaaggaattgtaccagctcctctttgtacctctggtagaattcggctgtgaatccgtctggtcctgggctttgtttgggagggtattcattactgcctcaatttcagaacttgttattgatctattcagggattcaacttcttccttgtttagtcttgggagggtgtgtgtgtccaggaatttatctatttcttctagattttctggtttatttgtgtagaggtgtttatagttaatagtattctctgatagtagtttgtatttctgtgggatcagtggtgatatcccctttatcattttttattgtgtctatttgattctttcttttctcctttattagtctagctagcagtccatctattttgttaatcttctcaaaaaaaaaaaaaaacagctcttggattcaatgatttttttaagggttttttatgtctctatctctctcagttctgttctgatcttagttatttcttgtctcctgctagcttttgaatttgtttgctcttgcttctctagttcttttaattatgatgttaggtgtcaattttagatctttcctgctttctgatgtgggcatttagtactataaatttccctcttaacactgctttagctgtgtcccagtgattctggtacgttgtctctttgttctcattggttttaaagaactttgttatttctgccttcatttcgttatttacccagtagtcattcaacagcaagttgttcagtttccatgtggttgtgtggttttgagtgagttttttaatcctaagttctaatttgacggcactgtggtctgagagactgttatgatttccattcttttgcatttgctgaggagtgttttacttccaattatgtcatcaattttagaataagtgccatttggtactgagaagaatatatattttgttggggtggagagttctgtagatgtctattaggtccacttggtccagagctgagttcaagtcctgaatatccttgttaattttctgtcttgttgagccatctaatattgacagtggagtgttaaagtttcccaccattattgtgtgggagtctaagtctctttacaggtctctaagaacttggtttatgaatctgggtgctcctgtattgggtgcatatatatttaggacagttagctcttcttgttgcattgatccctttaccattgtgtaatgcccttcattgtcctttttgatctttgttggtttaaagtctgttttatcagagactaggattgcaacccctgtcatttatttgccttccatttgcttggtaaatattcctctatccctttattttgaacctatacgtgtctttgcacgtgagatgggtctcctgaatgcagcacaccaataggtcttaactccttatccaattgccagtctgtgtcttttaattagggcatttagcccatttacatttaaggttaatattgttatgggtaaatctgatcctgtcatcatgatgctagctggttattttgcacattagttgatgcaatttcttcatagtgtcattggtctttacattttggtgtgtttttgcagtggctggtactggtttttcctttccatatttagtgcttccttcaggagctcttctggtggtgacaaaatacctcagcatttgcttgtctggaaaggattttatttctccttcacttatgaagcttaatttgactggatatgaaattctggattgaaaattctttcagaatgttgaatattggcctctaccctcttctggtttgtagggtttctacagagagatcaactgttagtctaatgagcttccctttgtaggtaacttgacctttctctctggctgcccttaacattttttcttttgtttcaaccttggagtatctgcaattatgtgtcttggggttgctcttcttgaggagtatcttagtggtgttctctgtatttcctgaatttgaatgttggcctgtcttgctaggttggggaagttctcctggataatatcctgaagtgtgttttccaacttggttccattctccccgtcactttcaggtacaccagtcaatcataggtttggtcttttccacatagtaccatatttcttggaggctttgtttgttccttttcattccttatttttttttctaatcttgtctttacgccttattttagtaaggagatcttcagtctctgataccctttcttccgcttgatggatttggctattgatacttgtgaatgcttcacacagttctcatgctgtgtttttcagctccatcaggtcaatttatgttcttctttagactggttattctagttagcagttcctgtaatcttttatcaaggttcttagcttccttgcattgggttagaacatactcctttagctcagaggagtttattacccaccttctgaagcctacttctgtcaattcatcaatctcattctctatccagttttgtgtccttgctggaaaggagttgtgatcatttggagaagaggcattctggtttttagaattttcagcatttttgtgctggtttttcctcatctttgtggatttatttaccttcgatctttggggatgatgacctttggattgggtttctgtgtggggttcttttttgttgatgttgatgttgatgttgttgctttctgtgcattagtttttcttctaacaggcccctcctctgtaagtctgctgccgtttgctggaggtccactccagaccctgttttcctgggtatcaccagtggaggctgcagaacagcaaagattgctgcctgctccttcctctggaagctttgtcccagaggggcactggcctgatgccagccagagctctcctgcatgaggtgtctgtcgacccctgctgggaggtctctctcagtcaggaggcacgggggtcagggacccacctgaggaggcaggctgtccctttgcagagctggtgcactgtgctgggagaatcccccttgtcaggatcagctgctctcttcagagtcagcaggcaggaaaaattaaattcgttgaagctgccccacagctgcccctcccacaggtgctctgtcccagggagataagagttttatctgtaatcccctgactggggctgctgcttttccttcagagatgccctgcccagtgaggaggaatctagggaagcagtctggccacatccactgtgctgtgctgtggtgaattctgcccagtccatacctcccagcctccttagcagtgtcaggggaaaactaaagcctcataatagcagatgcccctccccctaccaagcttgattgtcgcaggtcaacttcagactgctgtgctggctgtaagaatttcaagccagtggttcttagcttgctgggctcctttagagtgggacctgctgagccagaccacttggctccctggcttcagctgcctttccaggggagtgaatgattctatcttgcttgggttcctggcaccactggggtatgaaaaaaactcctgcagttagcatggtgtctgcccaaacagccacccaattttgggcttgaaacccagtgccctggtggtgtaggcacacgagggagcctcctgatctgtgggttgcaaaaaccatgggaaaagtgcactacccagtcttggtagcacggtccctcacggcttcccttggcttcgggagggaggtcccctggcttctggcactttccgggtgaagtgacacttcagcttgcttctgcttgctgtctgtgggttgcacccaatacctaaccagtcccagtgaaatgaactgggtacctcagttggaaatgcacctaccttctgcattggtctcactgggagctgcagactggagttatttctatttggctatcttggcccctccctaaacacatctttttaaatatgccatccaatgtgttgtcaaaaaatgattaattaaaacatggaatcaaaaatgtacacatttctaggctttcaggggggtcctgacatcttagctgtggatctcccaatacctgcaggtcacagggccacagaagctgcacctctaggagcagaggacacagagcagtgaagaggagacctggagctctggctgcagtgagagacccagtttgcaaaatttttattgctgcttttgtaattttgttgcttttcttttattacctttcatatattatatatatatataaaatatattatatatatataatataaaaaatatatattatatataatataaaatatatatattatatatatataaaatatatattatatatattatatatataaaatatatattatatatattatatataaaatatatatattatatatatatataaaatatatatattttatatatatataaaatatatatatattatattatatatataaacctctctcatgtatatgtgtgtgtgtgtgtgtgtgtgtgtgcacgtgtgcatgagtctttttttatgctggtaccacactgtcttgctatgttgcccagctgatctcaagctgatcttcttgtctcagtgccctgagtagctgggattacaagtggctgtaatcacccggctgatctttcttttatattagtccatgtatttatttttgctgaagatcttcatatcttcctatgggtatgagttactgtaagtgtccttgcatttctacctgaaggactaccattaacattttttataaggcaggtctagtggtaatgaatttcctgggtttctggttatctgtgaatgtcttaacttttccatcattttgaaagactgttttgccagatgcagaattctcagctgacattttctttcagcactttatcccactgcattttgtcctccaaagtatatgctgaagaattgattgatagtatttttgaagattgcttgtatgtgatgagttgcttctctcttctctcaattctgtctttaacagtttgattataatatgttttggagtggaccactttggaagctgagtttcttggatttgtatattaatgtctttcattgtatttgggattttttttagtcattatttctgcatataatctcactatctctttcttctccttggattctcataatgcatatattaatctgcttcataagtcccttcatctctgttcacttttattttagatttgaaaattttgaatgtactatcttccactgatttttttttccttctgcctgttcacatctgctttgatttctcttgaataaatgcctaggagtgaaattgccgggttatggtttcagtatatgtttaattttataagaaactgccagacatttttggaaagtggctatgtattttacacttttatccataatgcatcagagttgctattgatctatatttttgccagcatttggtgttaaagtcttcaattttaaccattctgatgggtgtgtaatagtaccttattgtagtttaaatttgtgggttttttgggctctgatcattaatctctgacggctaatgatattgaatactttttcatgtgtttatttgccattagtagattttcatttgtaaaatatctgttcaaatatattgccccttatttaattgagtggtttgaaccttttaaagaaacggagttgtgggagttccttatctattccaattattagtcctatgtcacactttagttttgagaatattttctcttggtctggagtttatctatttttttttagtggtgtattttgattaggagcagcttttaatttggataaagtctaatttatcaattttttgatggttatggccttctttgtcctttccaagaaacttttgcctactcccaagccataaatacattcttccagaagtttcatagttttattctttgtttagacctgtgatccattttgagttgacttttgtgcaggtgtggggtaaaggtcaaggttcatttgttttcccatttggattttcagttgtttcagtaccatttgatgaaaagacttctttttgcataagattgctttgatacttttgttgttgaaaattagtggaccatataaatatgaatctacttctaagctctgttctatttatctacttgtctgttttttatgctggtaccacactgtcttgattaccatactttatagtaaatcatagagatagatagtaccagcccttcaagtttgttcttcttttacaagatgtatttggctattttgggtccttttcatttatgtgtaaattttagaatcagcttgtcaatttctttgaaagcgcctttcaggattatgatttgggttgccattgaatctacaggtaaatttgaggagaattgacatcttaacaacattaagccttccatctatgaacagatgcatttctccatttacttcagttttcttcattgtccttcagcgatgtttacagttttcaatgtagaggtcttgcacatcctttgttaaatttatttttaaacatctaattgtttgatattgaaaataaaatttatttcaaatcatttgcttctagtatataaaaacataattgctttttatactaaccttgcatcttgcagctttgcgaaactcatttattctaatagttgttttgctgattacttggaattttctacaatgttgattagaagtgttgagaatagacatctttgctttttctttttatcttaggggaaaacatttattccaccacttcatatgatgttaaatataagtattttgtaaatgttctttatcagattgagaaagttccttccaattctaaacttactgagacttttataaaaattcacgataaaataataatgaattttgccaaacggccttttctgtacctactaaaatgatttttattatctcctttattctgttaatatagtgaatttcatttttttcaaacaataaactaaacttgcttctctaggaaaatctgcaactgctctcaatgtattctttttaacatattgctaggcttgacttgttaatatattaagacttttttcacctatttttctagcagttttgttttagaatccaaaagcaatatatacttacagcaggggggaccttcaaccaatttaaaagtgaatcaattaaatataaaagttacttctttctatcccatccatcctcttaaagaaataatcacaatgaacaatttgatgtgtattcctctcactttttaaatacatgcacaaatatatacagtttaaattctgctttttcacataacacttcctcataacattaaatattctccaaaatatgtatttttaatgtatttaactattttcctattgttggacatataggtcgcatatatttattcattgagacagggtctcactgtgtcactcaggctggagtgcaatggtgcgattatggttcactgcagccttgaactcctgggctcaagtaatcctcccaccttaggctccccagcagctgggaccacaggcacatgccaccacatctagctaattttttgacttttttgtagagatgggggtctcactttgttgcccaggttgctttcaaactcctgggctcaagagatcctcccgccttggcctcccaaagtgttgggattacaggtgtgagccatggtgcctggccatattactttattatggaatgaaacaaaatgttaaagatgatgtatgctgagagtacaatggagttacataccaggtgctgaaaagacttctcaaagtagatggctgtgcttgagctgatttctgatagttgacagagtgctgagttgtttcattaagaatggaagacagggagggaaggaagacaaagtaggaaaagcagaaggaagacagaaataaagaagggggaaaaggacaagagaaaaaagatgaagaaaaaaaatcattagtatcatgcttagtagctgctcgacatatacagtgttctgaaccaccagcccatttctccatcccatctttaaaagaaagatccttccaatgtagttcaccctttccttgcaaaatgttttttgttatttgaattttactatttttagctggtgaaaagccaaacaactcatggaaaactttcccatgaggtaataggaaccactgagcaacattccaaatgtcttatttcaagtgattacacataagatttgtttttcttctatgcttttctgttggataatgaggaatatatacagatgtttattttgtaatgtctccaactcctcttgtagatcctatcatagtgtatcctctaaaatctaaacatacttggcaggtgatttttcctcttttcacctccctcctttgaatggccaacaacagaatatttccacttcctaagtttggctcttttacttttttctttctttctttctttttttttttttttattttttttttgagactgggtgtcactctgttgcccagactggagtgcagtggcgcaatctcggctcactgcaacctctgcctccggggttcaagtgattctcctgcctcagcctcctgagtagctgggattacaggcgcacgccaccatgcctggctaatatatatatatctatttttttttaagtagagacggggtttcaccttgttggccaggctgctctcgaactcctgacctcaagtgatccacccacctcggcctcccaaactgctgggattacaggtgtgaaccaccatgcctggccctttatttatttatttatttttttaatgagacagggtcacactccatcacccaggctggagtgccgtggtgtgctcatggctcatttcagccttgacctcctgggctcaagtgatcctcccacctcagcctcctgagtagctgggaatgcaggtgcacaccaccattcccagctaatttttgtattttttgtagagacagccatttgccatgttgcccaggctagtctcaaactcctggattcaagagattcacccacttcagcctcccaaagtgctgggattacaggcatgaagtttggctcttttaaatctacctgaattctgcttctctagtatcccactgtcttcctactgaatactatttaagagtaaaatatattggagattctcatgatttcctgctagtcttctagcatcattgatttgtgcaaaaggaaattgcttcctagactgttctagctattgtagttccacatagtcttttcaggtggaactagttcttgctctactttacttaaggtatattttctttctgtgcaccatttttcttttcttttttttttttttgacagagtcttgccatctcaaaagtgagatggagtgcagtggtgccatctcagctcacagcagcctctgcctcctaggctcaagctatcctcccacctcagcctcccaagtagctgggattactagtagcataggccaccatgcccagcttattttcatattgttagtagagagggggttttgccatgttggctggcctggtcccaaactcctggcttcaagtgatccacctgcctcagcctcccaaagtgctgggattacagcatgagcaactgcacccagctctgtgcataatttttcttatctgaaacatgggtgtaaatttaccatgctgctttctgaagggaggctgtgataatcaaatggaatgtgtgtacaacttgcttaaatggtcaaaagtggttgatgtcatattcattattaatatatattaataatgatagctgccatttagtttagtctttgatatgtactaggccctgaggtaggtcctttattgacattatctcactttaattctcaaaacaattctattattcacattttagagatgaggaattaaagcaatttacctaacagcattcagagacagaattcaggtctttctgaatccatagcctaagcttttaaacattatattgaatgcctgtcaagaatatttattgaatgtacggtatgaaatgtaataatgaggttacctgaatagtcactaaataacagcaatctatgattgcttaggtggtttccccactattggtttagccataagctaaaaataataataattttaaaataccttatttttgtgtagcacttactgtatagacatttaattcaatcaacactgcattaaccagggcagatattaacctcactttgcacgtggtaaaacaatgcttcagaaaggttgatagtcttagatctcacaactagctgagtgccaacgccagatctttccttttttatgttcattactataactttattgacctgcagtagctttttttttttttttaggaaatagaaacaacagtcaattgtaatacttaaatataattatctcacagatcagaagtctcatttcagtcattctccaagatttaatgtatgtatcatgttaattctctcatgctaatggtttttgtccttggggctgtattagttttctgtggttgctgtgacaaattaccacaaacttggcgatttaaaacaatgtacatttactggcccacaattttttaggtaagaaatccaacatgtctctcactggactaaaatcaaggtgttggcaaggctgtattactttctagagatcctaagggaataattcatttccttgcctttctagcgtctagagactgcccatactccttggatcacggcccttcctctattatcatagccagcaatgaagggtcaaatccatctcacatggcatcattccaatctcctgtttttcttcctcttccactttcatggacccttgtgattccattgggcccatccagacaatccagaataatttccctatcttaagggaaattacagctgattaacaactgtaattccctgttgctatgtaacataatatattcacaggtttcagggattagaattaggacatggacatctttgtgggaccattattctgcctgccacaggggctcatttatgtttaaaatgaaggacaaaagtgattggcgtaggtagttgcagtgactttcctcagtggtctgtagatctgtttccataacagcaagaagagagctgttacattgtgggttggtgagccggtgggttgggcatgctcatacacaaactgctcggtagggaaaggagaaggcacatgagcaagggatggccctggtggccagggtaaggattttactttgtgtgctgaggcattctagactatttgggtttggaaaataagtttcaaaccactgagcttggccaataaggtttttcataatatagcccttgctttcttttcaagtctcaatgagttattttttctagcttaaatgagatactaaatatcaaatacttggtataaggtagatatattagtcaaggtacttagttataaaagcaaaaaacaaacctacttcagttagtgtaagcgctaagaaatttgttaaagaatagtagaatcttgagggcaggacaaccatgccaggtggaggagcaggaacaatgtcccaatttatattaaggaaggcttcagagcctggacacaggcctgaacatgggatgcaactgctgggctctcagcaagtgctgcctctgaaggctgaatgcttcctttccatccggcgagaaataattcttaccagcacctccttattcatgtcactcttttaatttgatgacttagctagatagttctgatcaacagagtccaggtcccatacctatatgccactcacaaacaaggttaaataggtgagtttctgacttctgtactggagaggcagggactccaatagtagggaattcccaaaatatatgaaagttgttaaaaagctgcgagaaaacatgacaaatattccaatagtaggtagtcagtaaatagtacctctcttctccagggagaagaacatactagaataggtacataaacatccattaacaggttagatgagtgaagttcactatgaaattttattatgaaaactttcaaatacataccaagcttcaacttttgtcaactgatggtctaccttgttttagctctacctgtactcgttccttcattttccctacccccactgttttgaggaaaatctcaaacattaaatatttttgttcataaatgttaacatgcatctctaaaacgtgaagattgcttatgaatttttgattgtggagaagtaacatggcataaccacatttctgaatttagataaggattcatattttccttcagggcagaagtgttgatccagtccccactgtgtggaagatatagttagttcacattcttcaggagctcacaacccatttattcattcatccatgcattcctccatgaagcaggaaaacaggtaagtaagtaccggctaccttttctacgctgggctcaacatagatgaatcaaaatataatcactgttcttaggaaattttgatgaaaagcagataaaggcctaaagcattaaacaacaaagctgaatataaaccattagtcagtaagcaatagacagatatggtaaggcagcaggtgagtgatcacaaaatgaattaagaaatagtagacaaaattctctacatatttatagaaggtttttgatatgctcattcatagttagtgttcattttgcattgctataaaggagtacccgaggctggctaatttatgaagaaaaaaggtttaattagctcacagctctgcacactgttcaagcatggcacctgcatctatctgctcagcttctggtgaggcttcaggaagcttttactcatggcagaagatgatggtggagcaggcaggtcctatggtgagaaagagagcaagagagggagggaggaatgccatgctattttaaacaaccagctcttatgtgaaccaacagaatgagaactcattcattactgcagtcagggcaccacaccattcatgagggatctgtccccatgacccaaacaccttccactgggccccacctccagcactggggatcacatttcaacatgagatttggaaggaacaaatatccaaaccatatcagttactcacaggtagaaattacatgggtacttaagataattgagtatctttgtggattattcaatcacagaaatttaaaacaaattttagaacagagaaaaatttgcccaacatatttgttaaactttcctgtcaggggattacatcaaagcacgttcatctcctcaaacatattgctaatttttactcaaatatgaagtggtatctgaaattatgtcagtctctgaggttgtaattgtaggtgtgcaacttcagtaatttccaaacccaaagaggcacacatctaactcataatggctataacaaatgtgtacataaggaagaaatacagccctttatgtttataagtaaaacatggataaatattaccagaacttaactgagtttttaaatttttttaatttcataagtgtagtcagtcttcgactcctctgtttttatcattttcagtagagatagaattgcaaacaaggaaagaattctatggactatacaagttggtctagtgctttgggcaataagctaatcctcaaattgcttaactctgagcatactatgacattcatcagatagcatatcttaaattgacgctgtgaaacacaccttgggtgtgggtgcttggttgtataaagttctgtatttcatgtaaaaagcatggggtaaaaagttatcaccctaatagtgaggctagaatttctcaagtatggcaaattaacatgcgaggaacagtattttctgagtgatcaggcacatggctcgtttcttttgaaacctgccattctaagtacaagtcattgacttggaaatggatatcaaagagaaggtcataatagtgatgaagaagtttacactcaaatctttttaaaaaaccttcaaccagttactgaaaatgaaacaaaatatcaaaggtcttcctctgcatgggcaatcaaataggcactgctatcatcatggggaaactgtttctttgtgatattttgtgtctaaacttttttgtaagatgctctgaaaagtgaagaaagggataagaactacaatgtctttggccaagaaaagtagatttgaaagggctgtctggcctataagtggacgacactagggctctggaggaaaattgttatttactgaaaagaaataacattgagtggcttcaccatgtttactatgaaaacagactggaggctgctgatgtaattatattttcattgtgcacttgactccttataattgtttggaggctgtacagaaaagagttggcataacaggcccaagtgctattctttgacaggcttgattataaggctggcatctgcgaacttaggttgtgggagggttcctgtgattaactggtagagtgtaccagttagaggtacaatagcttagtacctaagctatttgaacaaacaatgtggttatactgaacacgtgattttcttctggaaatttaaagtttgggtatgtgccaatcagaggatgcctacataactagcccccaataaaatccctgagtgctgagtctctcctggttggtaatatttcacatgtgtgctttcaacttgttgtcaggggaattacgcacatcccacgtaactctgttgggagaggactctggaaactcatgcctagtttcccccttgctttgccccatgtggcttttttcctttgctgattctgccttatatcatttcactgcaataagtcatggatgtgagtatgactatgggccgaatccctcaaacaaatcatgggaccctgcatggtcttgggaactccttacacagtggctctaaagagaaatatgagaggattatggccttggattttggaatattgctttttttgtacatttgttatatttagtagggtagagtcagtatgctatagagcaaacttgtctaatctgtggcccacaggccgcaggcggcccaggacagctttgaatatggctcaagacaaattcataaactttcttaaaacattatgacattatgagcttttcttgcaattttttttttgttttagctcatcagctactattagtatttgtgtattttatgtgtggcccaaggcaattcttatgttatggcccaggaaagccaagaaattggacacctgtgcataaagggtgaagttgtgggccatggcatgaaagagaccaaggtttgaatcctagctgtgacttaagcaagtgactttgacactctaagcttcagtttccttacatgtaaaatgtagacagtggtatttattctggagattaaatgggataaagcttacgtctgtgtctgtcatatagtcatagttcaatattgtgaattgaggaagactattgaggtgtatcttcaaatattctgccaattgataacattgtatctgtggtagagtcaattccaaattatttttgatattggagaaagattgaagaaagaaggaaaatcatttatataatactttaaatttacataatatttcatcatagaagtatctttttcacattataaagctaatatacacttataataaaagcatttaaatgatacaaaaatgtaaaaagtagaaagtgtaattcctccagaattttacatcctccctccaagatttggtggttattctttgagatttctttctgtgtatctagaaacattgtttttaggcaaaaatagatcacattattcatactatttaattttttattcaccaatatatcgaggcatttggcattttcacgttgttacggatagagtgacctcattatttttaaatgtggcatagtttcgtatagtttgggcatagggtagtctgtttagccaagctccttggtggacctttgagttagttccaatctgaagtcaccataaacaatattacagtaaataaactctacattttagaaaacagttgctactttctctattctttgagaagaaataataatagcatttttaaaaaggcctggatagttgttcttaatgaagttgcaagatatgcttatttaacctgaagacatgggctgagggatgctgaatcacttcaatacttgcaactatggcagcttcaggacagagatgagcttagactaccaaccaaagaaaactaaaatgaaaaaactgtgttcagtgtacactgctcaggtgatgggtgtgccaaaatctcagaaatcaccactaaagaacatattcacgtcaccaaacaccacctgttccccaaagagctattgaaataaatagggtgggcgtaggtggctcaagcctgtaatcttagcactttgggaagccgacgtggttggatcacttgaggtcaggagtttaagaccagcctgaccaacatgttgaaaccctctctctactaaaaatacaaatattagctgggcgtggtggtgtacgcctgtaatcccagctactcaggtcgttgggacatgagaatcacttgaactcagaggctgtgcactccagcgcaactgcactccagcctgggtgatagaggaagatgctatctcaaaaaaaaaaaaatggaaagaaaaagctgtgttcaaacttcaaactgagactataaaagtttgggcagttactgtaatctccttaaaaatttggccagaatgtacagaccacatttggatcctgatttgatccagaaatagatgagacaattgggaaaacttgaccatagacttgatatttgaggataggaaataatttttaataaatgtattaggtttggtagtgatattatggttatcgttcttcagagtctttgtattttagagaaacataataaaatattgcaggataaaatcatatgtctggggttggctttagaatcatccaactaaggagaacaaaattgtgtgaggttgcatgcatggatgtaagggtgtgtgggcagagatgaattgttgaagctggctcaaggagtttcattatataatactctcaacatttgtatattgtgaaaattttcataataagttgaaaagcaaggaaaaaaacaacttagtttcaacggctaattgtttctactggggcggagagaagtaatgaaaatgccagagggaaaagggtgtttttttttcagggctgactaatcttagtaatggattttcactcctggccttagtccaggggtgcagagctttggattcttaaggtcgctgactcatcagaagaaaataaaacgaggacataagtttttaattttaaaaatttaaaaaaaattgtttttaagacaccgagagcactaactttgaaaatttaagaaattaagagagaaatcacaggatttgaatcactaagtaattgtgataataagttgatgtctttgagtaaaaaaacgtttttttttctttctttttttttttttttttggctgcttggcattcactatctctttctaatagcactgccagtttccaaacacatccgctctatcatgtacagccttcatgggagaggaaatccagtggtctgcctcttacttcataagctccttcttctcatgacctggccaagggaggtcactgagattttcacaaaaggtttaccctagcagtgacctccttgaccagactgttcctgctgggaaaccaatcctttggctcccactttctagtccttagagctaccctggatcctgccaatctccaaggcccgttctcttagcttgcctacatgattctcattgataccaagtttcttacgctaacctgtcttttgctggaagtagccagagttggatttttgccattagtgagcaaaaagtttattcctctgttgtgagttaaggtcaattaaacgctactagagaaagaggctgtcagccagaaagaggaatagaatgattaagggagcagctggagaaagagcaaagaaggggtttgtgggagcaaaattcagcagaaagctataatagatgaggcactggagaaagacagtaagaccatttgtttttgcctatcctttctctgcttcttaacaagaaccagattcccctccaccaccttaccccaattcctgccaaagatctctgttgctcttcttcagatcctacccctcccactcaaagctgcaaactgtccagggccaatcagtagcttcacaggcgcattctatccctgtacttccccacccagccaaccaggagcctcatctcggctaacttgccatgtaccccaaccctgccaactccctgcccaacagggaggggctgaatttccatcactcttggcacatttatccacactatctgctgttatcttagacctgctttgcccctttttgtctctgataatcatcataggttgaaattctctgaggatgacctgaatagaaaattaaaacttgtatcttttcacagaaactcttttgttttagaactagtcaagggtggtttttggaggagacaatgtcagtcaacttaacaataacccacaacctttgaaccaactcagaaatgccctttcaaaaatatagcataggtctttaatgtaatttctttttaagtaaacatgaatttaaacagccaagcaaatgtagaccctattaaaataatgtcctcagaggctaccaggttattctaactatgctgccgtttcttctcatatttttgaaactcatttctggtcatttcttttagcatctaaagcctgatttttctcattcaatgaatatgttctgagtgtctagcatgttacaaactttgggccagggactggtgaagaagaggttatggtttttaaactccgagtctcagaaagggcacagatacaaaagcacttataaaaagcaagagatccagataatgaatttctaaataatcaagtgctgttaggactgtctacagtttgaaggaaattctttacagcatccaaaagtaagcaaattgacttttttttttttttttttttttggagacagagtcttactctgttgcccaggctggagtgcagtggcatgatctcagctcactgggactacaggtgtgtgccaccacatctggctaatttttttgtgtgtttttagtagaaacagggcttcaccatgttggccaggctgctcctgaactcctgacatcaagtgatccacttgcctggcctcccaaagtgccaggattacagatatgagccgccgcacccggcctcaaattgacatctatcctctagcacctagattgtggtttccagacacattttccagcaagaagaaccaaaacttttaggagaaatagctgattcaaggtgttggacacaaaatatacacgaagaacatggaatatcttgttatatgagaggcaaggaaatatcaaatactattggggtcatctcaaaatgactcacaagggccagcttgaaaaccttcctacttaccacttcgcacctgttagagcagctattatcaacaagatgaaagataataatgttggtgaggatatagaagaaagggaacccttaaattgctggtgaaagtataaaatagcactgctgctatggaaaacactatgaagtttccccccaaaatttaaaatagaactatcatatgacccagtaatcccattaatgggtatatatccaaaggaattgaagtgagtgtgtcagagatatttgaaaagagaatatctgcactcccatgtttattgcagcattaatcacaatagccaagatacggaatcaacctcaatctatcgtgaataaaaggataaggaaaatgtgtatatacacacaatggaatactattcagccttaaaaaaagaaggaaatgctgtcatttgtgacaacatagatgaaactagagcacattatattaaatgaaataagccagcacaaaaagacaaatactgcatgatcgcatttatatgtatgtcttagtctgtttgatattggtataataaaatatcacagactggtaatttttcaacaggaatgtatttctcatagttctggaggctgggaagttcaagaaaaagacactggcaggtttgatacatggtgaggacccaatctctgcttccaaattggcaactagttgctgcatcctttggaggggaagaacactgtcctcacatggcagaagagcataggagcaagaggactctcccttcaaccttgagcccttttaagtgtgcgaattccattcatgagggtagagccctcatgactgaatcaccttccaaaggccacagctcttaatacttttgcatggggattaagtttcaacatgagttttggagggaataccatctttcaacatagcaattgtaagatttaaaaaagtcaaattcatcaaggcagaaagtagagtgatggttaccaaaggctgggagatgggcgaattgggaagatgttagtcaaaggatacaaaatttcagttggacaggaggaataaattcaagaaatctattgtccattgtgttcactatagttaacatattgtatacttgaaaattgctgagatcaaattttaagtgttctcaccacaaaaaaagtatgtgaggtaacatatatgttaattagctctattcagccattccacaatgtatgcatatatcataacatcatgtatactctaaatatacacactttatttgccagttaaaaaataggcttctcactgaccaaaatgggatgatatgagcactaatacaagtaatgagtggattcaaactcatcaaatatgtttaacgcaatgtgttcataatgtaactaaaattagagggtcctaggaaaccaactccttattttgaaaaataattaaagaaaaatattatgtattcttttctttgcaaactgtacaactgggtaagcaagttgtaggtaaagggaaatttatcttaccaaaggattatagttaatgtatgaaaaagaagtgatggagttttgcccttttgcaagcccctgatgaaatgataaatcatagaattgaacattaatggttggtaacatcaaacacaaaaagacagaatctgacatcctggtcatcctgataaatgccaaactaccatttggctgcctctagggacagatgttagagatggagcaagaaagatttgactttaccttaaataccctctcttttttttttttgagacagggtcttgagctatcgcccaggttagagtgcagtgcttttttccatgctaagttattgtattattttttctcaattaaaattttgtttccatttgtaaaaataatacaatattttaggaaatttataaaaatacgggagatcttaaaggtttaaatatacatcttagaaggaatgacattcactgaactttttttttcctagaggccagggtagaaagcaggcaatgtaatgaataatcaatatttattaaatgccctctttgtttttgtgacctctatcttcaaataggttaccccagccagaaggttatttattcattcagtttagctgagatgggtggcaatatagtatgataataagggttttgcattctatttactgcaaaccacatagaaagcattcgtagggcaactactatgtttgtagtaaggtgctgtagggaagattatggtcataacaaccattccttcaacaaatacttaaagtgtgcctactagaagccagccatcattgtaagcactgtggatacagaggtaaatgtggcaaaattccttctcatgtggagcttatgatatacaatgggacagcacggtgcagtggctcatgcctgtaatcccagtactttgggaggctgaggcgggtggatcacctgaggttgggagttcaagatcagcctgggccaacatagtgaaaccccgtctctattaaaaatgcaaaaattagctgggtgtgttggcgtacgtctgtaatcctggttacttgggagactgaggcaagagaatcacttgaacctgggaggcagaggctgcgttgagtcgaagtcatgccattgcactccagcctgggcaacaagagtgagactttgtctcaaaaaaaaaaaaaatacagtgggacagagagataatacacccacctaccacgcacacaatataatgtcagatactggtttaaaaaaaaaaaactgaagaaaaaacagagtatatggatatagggctgttattatcacatacttaagcttatcatgtagcaagtgcagtacttagaagctttatatccataacctcatttaaaccccacaacctacatagagtaggagtcattatttctctgttgcagatgtggaaaagaggctttaagaggtgaagttcatatatcaagtaaatggaagaggtgttgtatttaagagcctctccccctctcttcccccaattccctctaggtctctctccttttctctctctctccctcttctccctctcaatttcaaaacttaaggtattattcagtatgatggaggcacagtagaaagatggaaggtcatgttaatacataaagaatgacctcattctcagtaacaatggtcttgttatataatctgtctgtctcactttcctcttctgcaggataatacccactacataaagttttaggatgacatgagaaaatatgtataaatcagaaggaacatacctcttatcaaaagtcctcagtacgtattatattgctaaatataattgatgggcatgtggtgaagagactgataaataattgggagttggggtactttctaagaggtgcaggtgggacctgatacacaaagcataagtatatggagtagattgggaggggcctcagtgtttggagaaggattaggaggacatcaaagcaaacctttggtagactgtgtgaagaaagatagcaccttgatattcaataaaactgttttccaaagtcaacagccatgagtattgtaggttgctttttggatcaatgagaagaatctcaactgttgcttcaatagtggttcctcaaattgcctgacaatcaaacttatctgggaaacttcttacaaagacacattcaaagttctgtgtcctccaaggtggaaatttccatggtagtataaaaggaacaaaaccatttgttcactgctataaccccaaaacctagagcagtacctggcatgtgtaggatattcaactagtgcttgttgactgaatctcctttattttttcctccttcctatcttccttttgttttccccaaacacataggacattcccctaacacatgtgaaatgctctgtgactctgtcctgcatcttcccaggggtggattatgtgtggagaaaaatgtcactttgtctttgatgggatttaagggggcatggtcatgcctgcttgctccaaactcttcctcactctgtttgctagcataccagcaatgtccacacggcagctattccgtgttgagatcatgcatttcctgaaaacccctactgctactacataacgcattgcactgagaaggagagtgactgggtgaaatcactttaactctcagcttctcactcatttgcgctggttaggctatgagaaggcttgctgccactttgagtagcagaggggccaggtcctgaaggaatgagacagggcagtattgatgggaaagagcaggaaggaaaagtcccagggcttaggggtggcaagctaggaggagtacccagaaagatggctggtgtggaggaagcttttgggggatggtggcatttgatgagcatgggaggtgttcccacttaagagagacttttcctgagcaacactttgagtcaggttggtagggtgttattaatggctccaagtgcttggtacatagttgactcacctgctgaaacacttgctgagttagcggttcaatttcacagatgtttttaagtcttgggtatgcagagactgacctctgtgtgactgtcacagagcctgacattcccagaagacagattcacaagttttcaccctttctagcactatgtgagctctgatgattgtttcctcacgttaatttagtggttcttcccctgaccttgggcattctcccacacacatgcactgatcagcacttagctgaatgtttgagggggaccttctgtaggtcttcaagttttcccagggcagctctcatgtctttggtgctctgccctaggcactctagccaccttactctccagactctcagctgtctcctcagttccaggatacctccacaaaggtgcctcttccctgccctgtgacctgaaaaaacttcctccaaatagtatactggggcaatcattggctcacatcatttatttcctgtttcttggagatcaccattcttcattgtctaatttgttctaagactcgctgtttcacgtatttgtctttttgttgttgtttcagagaggaggataaatctggtctttcttactgcattttggccagaaatggaaatacatgagttattcttaatgcttttgtttcctactcacttttggttttaatttacatttctccaatgactaatgatgttggatacttttttatatgtgcccactggccatatgtatatcttttatgatgaaatgtctattcaaatctttggcctgttttttaaaaacttgtgttgcttatatttttattcttgagttgtaggaattctttgtatatctcccgccttttaaaatatgtaatcagtttagtaatcaatttattatacagattagctccagggagcaattagatttttaaatctatacaagtatttctttaaatggattttcacccttatgtacacttagacctaagcgattaagagcataagaaaaataagagctagtttgggcagacacggagctagctgcaagaatgtttttttcataccccagtggcactggaaccacagcaagacagaactgtttactcccctggaaagggggctgaagccagggagccaagtggtctcactcagtgggtcccattcccatggagcccagcaagctaagaaccattggcttgaaattctcactgccagcacagcagtctgaagttgacctgggaagatcgagcttgttgggaggaggggcatcagccattactgaggcttaagtaggcagttttcccctgacagtgctaaggagacctggaagttcggactgcacagaaatcaacacagcacagcaaagcggctgtggccacactgcttctctagattcctcttcactgggcagggcatctctaaaaggcagaagccccagtcagggacttatagataaagctcccatcttccctgcgacagagcacctgggagaaggggtggctgtgggcacagcttcagcagacttaattcctacctgccggctctgaacagagcagcgaatctcccagcacagctcttgagctctgctaagagacagactgcctcctcaagtgggtcctgacccccatgcctcctgactgggagagacctcccaacaggggtcaacaggcatctctgcctattgcaggagagctctggctggcatcaggatggggcacctctgggacgaagcttccagaggaaggagcaggcagcaacctttgctgttctgcggcctccactagtgatacccaggcaaatatagggtctggagtggacctccagcaaatggcagcagatctgcagcagaggggactgactgttagaaggaaaactaacaaacagaaagcaacaacatcaagatcaacaaaaaggacccccacacagaaacccaatccaaaggtcatcagcctcaaagatcaaaggtagataaatccacgaagatgaggaaaaaccagcacaaaaacaatgaaaattcccaaaaccagaatgcctcgtctcctccaaatgatcgcaactcctccagaaagggcacaaagctggatagagaatgagtttgatgaactgacagaagtaggcttcagaaggtgggtaataacaaatgcctctgagctaaagaagcgtgttctaatccaatgcaaggaagctaagaaccttgacaaaaggttacaggaactgctaactagaataatcagtttagagaggaacataaatgacctgatggagctgaaaagcacagcatgagaacttcatgaaccatacacaagtatcaatagctgaattcatcaagggggagaaaggatatcagagattgaagatcaagttagtgaaataaggcatgaagacaagattagagaaaaaacaaaaaggaacaaacaaagcctccaaaaaataagggactatgtgaaaagaccaaacctatgattatttggagtccctgaaagtgatggggagaatggaaccaagttggaaaacactcttcagtatattatccaggagaacttccccaacctagcaagacaggccaacaatcaaattcaggaaatacggagaacaccactaagatactacttgagaaaagcaacctcaagacacacaattgcagattctccaaggttgaaacgaaggaaaaaatgttaagggtagccagagagaaaggtcaagtaacctacaaagggaagcccatcagactaacagcaaatctctctgcagaaaccctacaaaccagaagagggtaggggccaatattcaacattctgaaagaattttcaatccagaatttcatatccagtcaaattaagcttcataagtgaaggagaaataaaatcctttccagacaagcaaatgctgaggtattttgtcaccaccagaagagctcctgaaggaagcactaaatatggaaaggaaaaaccagtaccagccactgcaaaaacacaccaaaatgtaaagaccaatgacactatgaagaaattgcatcaactaatgtgcaaaataaccagctagcatcatgatgacaggatcagatttacccataacaatattaaccttaaatgtaaatgggctaaatgccctaattaaaagacacagactggcaattggataagcagttaagacctattggtgtgctgtattcaggagacccatctcacatgcaaagacacacataggctcaaaataaagggatggaggaatatttactaagcaaatggaaagcaaaaaaaagcaggggttgcaattctagtctctgataaaacagactttaaaccaacaaagatcaaaaaggacaacaaagggcattacataatggtaaagggatcaatgcaacaagaagagctaactatcctaaatatatatgcactcaatacaggagcacctagatttataaaacaagttcttagagacctacaaagagatgtagactcccacacaataagagtaggagactttaacaccccactgtcaacattacatcaacgagacagaaaattaacaaggatattcaggacttgaactcagttctggaccaagtggacctaatagacatctacagaactctgtaccccaaatcaacagaatattcattcttctcagcaccacattgcactgattctaaaatcaaccacataattggaagtaaaacactcctcagcaaatgcaaaagaatggaaatcgtaagtctctcagactcaaattagaacataagattgagaaactcactgaaaaccgcacaactacatggaaactgaacaacttgctgttgaatgactactgggtacataacgaaatgtaggcagaaataaatgaaaccaatgagaacaaagacacaacataccagaatctctgggacatagctaaagcagtgttaaggaaatttatagcactaaatgcccaaaagagaaaggaggaaagatctaaaatcaacaccctaacatcacaaaagaactagagaagcaagagcaaacaaattcaaaagctagcaggagacaagaaataactaagatcagaacagaactgagggagatagagacacaaaaaacccttgaaaaaaatcaatgaatccaggagctggttttttgaaaagattaacaaaatagttagaccaatagctagattaataaaggagaaaagagagaagagtcaaatagacacaataagaaatgataaagaggatatcaccagtgatcccacagaaatacaaactactgtcagagtactataaacacctctacgcaaataaactagacatctagaagaaatggataaattcctctacacatacaccctcccaagactaaaccaggaagaagccaaatccctgaatagaccagtaacaagttctgaaattgaggcagtaattaatagcctatcaaccataaaagctcatgaccagatggattcacagccgaattctaccagaggtacaaagaggagcaggtaccattccttctgaaactattccaaacaacagaaaaacccatcacatttgatgtactaatagctccaatccatataaatgttgtccagttaaacttagaccttaaaatacaggatgtgggtagagtttaatctggttggtcataatttttacctaagatgtagctcctttgcaataaaatgaatacagaaacaacttcagttcactttgcttttcataactgtcttgattagagatggagtctactgaaaaacaatctcctacaggtgagtagagcttttctctcacatctaagcacacatcatacccaccacacctcactgttatccaaatttaagtcaatgaggaaagcttttagtctcacacctaggctatgcgtgtagaactggcttgtcacacacacacttctctgctaggaggcaatgttggtacagaagtacagtatttctagtctgttgttccaagtatgtacaacatgcagcattgctgtatcaggttgtatgtacagggcagggtgaggtgtatactcatagaaggcactaaaatggaaatcaaaagaacttgctcctttttttttttttgagactgggccttgctctgtcacccaggccagagtgcagtggtactatcatgactcactgcagccttgaattcctgggctcaaggtacctcccacttcagcatcctgagtagctgagaccaaaggcacatgccattatgcctggctaatttgttaatttttttgtagagacagcgtctcactatgttgtccaggccagttttgaactcctgggctcaagcaatcctcctgcttcagcctcccaaagtgttaggattacaggtgtcagccattatgcccagcctaaaaggactttctctttcagagtgcccctgtctttatttgtagaggttattcagtttctttaattacctggcatactttgagtccatccctgagctattctgctatacttttctctatcctttctgtagatctcagcaacctcattcactagaagatcatgtggattggaatcatacaatggggaacaaatggaaaagagtacttttgaaatagtgctggagaccactgtgaccacagaatgtcaagacacgtgctgccattactgttactatttggaaaatacattcttgtaaatgcaaccttagggggtttgagggggaagtctgttgggaaatgaattgcaagaaaaatattacaccctgattgggactgtcattttgcctcttattgcagcttgccagtcgacatgccatctccaacaggaccggctgtacactgtgctgggcgggggtgggtcccgtgccaggtcattcaattccttgtgagttctctttggagctttggtgggaggcaagtggtgctccctccaacccctggggccaggacgaggacagggaaggggtgggcgagggagcctgaggccgcctcatgatcacccaccagcgggagaaaatgcggcgttggggtgagcgggtctggggagacaggatgagcgctggggctgcctgctgagtggccgccgtgtcactctggatggtccctttatgcactgcagcagcttaactaactcccttttctctggtaatatttgttgcttaaaagaggatggctttatcatctttctcttaattaatatgttaatagttaatatggctatatcagctttctcttggttagaatctttctatatctttctcatattgtagatataagtatgtaaacaggcatatttcaggctcaggcatatagaattgatcataatattaaccatactattgtgggtctgttttatgtgtatgtaatctgttgtttttgctagctcttactcattgtgccttggctgtttagtaattttgtaccatgagctgcttcatggtttgtaattctacttgcagaaattctctttagctagcttaaagatggggtccttcaaagagaattttccccttcttctaggtttatgagaactgttagtccaggggcactctaaattaaatgttcagcaagacttttctccaattctctcaggtagtgtaaattcaagctacaaacatgcataaaggctagatttctctggtttttagtatttagaaggctgttttaatctcccttctgcttagcactaaaatttgagctcgtagattttctttcctctagagctggaggtgagaagggagaggtgaggggttggagactaatatgggtttatttctagttctttctaaaatagatggtttaactcattatgatcccaaccttttttgtggcagatctcctgttagacacagtttaattttgctgaccagtaatgattcagtgatgggaatctcgctctcttttaacatactccacaacgtgggcagaccccgggctgtgtctctggtgcctttgaggtcataaaatacaaagctcaatctcctcttcctcgcttctttcatttgacaaatggccggctccaggcctctcacaacttctctacagtggctcgtcttcacttagcccgatttgagaattccttactttcttactttcatgggctcttttcagttttgtttttttttgttttttttttttttttttttttttgagacggagtctcgctctgtcgcccaggctggagtgcggtggcgcaatctcggctcactgcaggctctgcctcccgggttcacgccattctcccgcctcagcctcccaagtggctgggattacaggtgcccgccaccacgcccggctaatttttttgtatttttagtagagacggagtttcactgtgttagccaggatggtctctatctcctgaccttgtgatctgcccacctcggcctcccaaagtgctgggattacaggcgtgagccaccacgcctggccccttttttagttgttttaaacaagagaatctgttgacgtatttagcttaccaccttactggaaacaatctaaatttagtagatgacacttcaaactctgtttaattgcttctgtgtgctttttcctctcaagtaattatatcttagtatattacagtcatgaatatttgttttttagaaattccaggatatgaatttgttttttataaattcctgaattccaggaaaggacactgggagggtggtgtgctctggttggtaagtggtaaacattttagttccaagcttgagtcagcctctttaaaaggatattgcagaattttggaacagataccacaaactccttaaatctgtcagcttgaaactgcccatgaaactgccggttttctatttttagcttttatttccattcagtttatcttttgcatttacttctgttgtttatatttctgctttagtagctttcttccaaaatcaaaatcatacaaacaagctgtagggggttgagtgcccctgcccccaaagatatgttcacccggaacctctgaatgtgaccttatttgggaaaagggactttgcagatataattaggctaggaatctcaggatgaaatcaccctggagtatctgggtgggccctaaatccaatgacaagtgtgcatccttatataagaggagaagagacagacaggaaagaaaaaaaaacaaaaacagaaaagatgatgtgaagttggaggtgaatgaagcaatgaatctataagcaaaagaatgccgagagtttccagcacccaccagaagccaggagaaaagccaaaccaggttctctcccagagcctctggaaggagccaaccctactgccaccttgatttcatattcaggcctcttgaactgtgagaaaataaatttctgttgttttctaaaggcactccatttgcggtcatctgctatggcagcttcaggaaatgaatctacaaatttataaattttctttgccccaggaatttttaaaagtttgcaatctagttttccatcaagcatgaccaaagaatgacaggtagatgagagaactggattagaacgtctctggaggttggatttcaagagtttcctggttgtgagaatcaaatacactgtgtgcttaaagcatttaacaaatgtgagactttccgtaacatgaccattgcttttttaagaagtctagcactcatgatcagtgctgaccgtcagctcccgctttgttctcaactacagcagtggttttagtgtttgacatttccacctgtctttccttcactccctgcccctcctccttcatacacactgaaattagctctctgaaacttctcagagcgagtctgaattttgtagagaagtagttttgtccaatgaagagtaacaacaaatagcccctggaatttgtctaccaaattataacacccctcacctcagcaattttggatactttatcattatagcagctgtctgagataggtattgtcatgaacattttatatgtaagggcagtttttctccagttagaatcaaagaactggagctggaaggaagtttggaattgctggcctttttcatcaattggttaattaaacaatttttaagtaaatataatgtgctagactctaagatgctctggggattcaaatataaccactctattccaggcttcatgtgctgatgagcaaaataatatatcactactagcaatagtgtagcaatttcatagcactaataaatttgaaattttaaaccattattataagtaggaattttttatacaccccaagtgaaacagtatacatcaataaaaatgtgttctaaagccctatttatgtttgttataaagtaaactaaggcacaacaaaatttcagagtctctttgaggaaacaatgattcatgaatgggacagctccaaaccagaagtggcttaggagctccatggagggaacacaagagggcagcttttataggatgaacatagaagtaaagcaaagaaaatatttgatgggttacaattatacagttgccttgtttggtctatccctttggaaagtccctagttacataagtttattggctacttctgattggttgagcttaagttctgtttttaatataggcatttataaaatatagctcaagtttcacttacgcttgtaaatcaagcaaggttatgatgaggcataaccaattttgtctgctcaagaattcttcaggcctggttttcattttgttttctttaacattttagtacctataaatttacttctttaactgctgcatagtattccacagaagaatgtaccataatgtatttgctcattcctctgttgatgttaccaatattttgttgcaatggacaactttttgtataaatgccaaagtacttcattagaaaaattatactagaatagaagtagaattggtgaatcaaaggatattcacatttaaaagttattatatagattacagatggtcctgacttacaatggttcaacttatggtttttcaactttatacaatgatgtgaaagtgatgcacatttaatagaaactgctttgaatttgaattttggtctttttccagagctagtgataagtagtatgatactcttacctcacacattcaacatttattataaaatagattttaaattagataattttgcccaactgtaggctagtgtaattgttctgagcaagtttaagctaggttaagctatgatgttcagcaggttaggtgtattaaatgcatttttgacttaagattattttcaacttataatagttttatcagaacacaacctattgtaagtcaaggagcatctgtatatagatactgtcaaattgctaaaaacactctatcaatttatgttcctgtcagtattatcagcatacacttttttcaaaattctcacacaatattattcatctttaaaattctgtcaatacaaagctagaaaaatgactcaagttattttaattggtttgtgaggagggcagaagagcaggttaagagagactttcactttgtttcttcacatctaatgggagacaaatctgcatgacctgggctaaagtggactgagccagtctgagacagggctgcaaagcctttggcagatgtcagcattcttgaaacacagaggctcttcaaggctgttcctagtgaaattttaaaattgtggtttaaaaacaaggattactaattgcattgatattaatatagccaagacttgctcttttttgattaatgaattcagggtatatcttttcccctttcttttactttcaatccacctgtgtaattgaagttgaagtgaatttcttatagatagcctattgttggaacatgtttttatttttatcccctctgcaaatttctgtcttttaattcgtgtatttagaccacttacatttaagggaattgttgatatgttagggcttatatctgccccactactttgttttctttttgtttcctctatttcctgtccctctgtctctcttttttgtaccttcctatgggttgattgaacatgtttcaggattcaatcttaatttatttattttatgtttttaagttgtaagagggaggatctaggaggagtggggcttaccatcatggctggagctggaagttgttgagtaattattttttattgtcataaaatgtacataacacaaactttatcaccttagccattctaaagtgtgcaatcagtggctgtgtagggagaaactctctcaaactgtgtctttactctcacactacaacaatcaacacagaaggcttctatgaccaaatatgttgggggttagggggttggttgccacacttcaagcagtggacaccagccaaatgtcctccaattcgattcttacactatctacctagagatggcgtcagatcccatgggttgggtctcagtccccaagactgtctcctctacaccagttgcaagtctgggcctctgaaacttctgaccaactagcttgaagttgagattcccaggaatcccctctttgggtttgattaattttctggagcagctcacagaattcagggaaacacttaaatttacttgtttattataaggaatattactaagaatacagatgaagaaacacatagggagagacataggggaagggatgcagagttccatgccctccctgggctccaccctccaggagcctccaggtgttcagctatctagaagctccctgaacccagtcctcttggatttttatggaaacttcgtgacatcagcattccttcccccagggtatgaggcgaggccctcatcggggagactcttaagacccacaatcagaaagacagggaacattagaatcctgccttgggtcaggtaaaaggaatgcaggaaagagattatttcctgaggcctgcccctgagacctaacacacccagcattataacgaaagactgtaacaagggatgtgggagttatgaaccaggaactaactgtgaaggagaacatcatcgactgtgccaaacgagctcagatgtccaggaaggggctgactaaaatgcattatttgaatatcatgatgcagaagatatatatatctatatatctatatagatagatgaaaacaaatatgtatattttctataatgttctataacacaagaagtttcccaaacatttatttacattgtttgtttattcccaaatatttatatttcccaaatacgacagcagggagactgagaaatcacaaaggacagatgagagcgatgttacttaatgccacagaacaggacatcatttaaaggagttactcaaagtgtttcagttactgccattaggaactcctaagcccctcggcagtgtgggtggtacggggtaggtgttgaggttagcagcacccacaggcttctcttcacgcaggatatgctatatagtgaatcggtatcaagactggaggaaggtaagggtttccagaaaaccaccttcaggccatggtttggagtagtcttattgaagtttacagaatcaaaagttacagataattaggaggcattgaaatacagacctgttttcttttttctttctttcttttttttttttttttttgagacggagtctcactctgttacccaagctggagtgcagtggtgagatctcggctcactgcaacctctgcctcctgggttcaagtgattcttctgcctcagcctcccaagtagctgggactacaggcgcaccccaccacacctgcctaatttttgtattttcagtagagatgggtttccacacattggccaggctggtctcaaactcctgacctcgtgatctgcccgccttggactcacaagtactaggattacaggcatgagccactgtgcccagctgacccagtttctacgaccagtttagccacaaagtagacatgtaaccagaggaaagtgacttaacctcctagggcctcagcttcccatattacacacccctgggatgagaatgataggaggtgtagcggggttgagctggataatataaggttccttacagctctagacatttatgatttaacattttttatggattgctaatgctgctttttttttgttttaaatgtcaaattcttgcatgtataaggccttgattctttcaggcctgggttgtgttgatttatgggcatgagctaattccagatgactcattctagaagtgattgtgtaagtatcctttacttagctaaacatatgcaacataaattcatctactataacatatgttctctcagaacatgctactggccagagttattagattttgttcacaccatagatcctgctgtattttatagcacttcagaataacaatcattcttttaaaacccttctacacacctttgctgtttctgtaaatacacctgtcctttacaagcatctggctctttctatgcattcttcctccagaaatcatagtattatagatttggaaaatgcttggccttcattttcctgttacagactggtttaggtgtccctcttaattgttcttaatgcattcagtatattcattcatttcttaattcattaaaaatatgcaccatgccaggtgttggggacattgcaatgaacaagacaggcatggcccctgctctcattcagtcatgtctaggggtaaaggtaaaccttggataagtaataattggtgtgctgactgttaagaagaactacagtgctatacaagctgtatgatcatattgggctttaaccaattccttgggaatcagatttctagatgaagtggcatttaagttgaaatctgagtagtgagtaggagttagccaggcaaagatgaggagggggaccactccaagctgagagaacagctgaaatgagaaagtccatgcaatattttttttttttttttttttttttaccataagaagatcacaccggccagaatggagagagggctggggagggtgatttgacctgagtctagagaggcaggcacagatcagaccaggatgcttatggcaggccacgctaaggattttggactttatccttatggaagttggaaatcattaagagtttaaagagagatatgatcaaatctgatattttaaataaagctcatttggctgtgatgtggcaagtgggctggagggcagggtggtgagaggagacacaggaagctcagttgggacattcctgctgtggttcagacgagagctatgtgggcttggactagggcagtgtgtctgcttcaaggggaaagggtttggtgttttgtggaatttggggaatgagggaatgtttcatgaagccgaaggggagagtgtttttaaaaggaggacatcatcgactgtgccagatggagctgagatgtccaggaaggggctgactacactagaatgcattatttgaatatcatgatgtggaagattttttgggggggtgggcagactcttgctctgtcacccacactggagtgcagtggtgtgatctcagctcactgcaacctctacctcccgggttcaagtgattctcctgcctcagcctcccgagtagctgggactacaggcgtgcaccaccacgcctggctaatttcttgtatttttagtagagatggggttttgtcatgttggccagcctggtctcgaactcctggactcaagtgatccgcccactttggcctcccaaagtgctgggattagatgtgagccaccgcacccacccagaaagatatttttgacctcaggaagaatgcttttggtggaatgacgagggtgaaatccatagtgtgtggcttaaggagtgaatggaaagaagaggaggagagagaggtggagagactacacctctttccagaagtttggctctgaaagtaaagagaaagggttaatactagatggtaacagtaagtaaagaaagaattgtagttttacagtttttttgtttatttgtttgtttgttttttgaggcagagtctcactctgtcgccaggctagagtgcagtggcatgatcttggctcactgcagcctctacctcccgggttcaagcaattcttctgcctcagcctccctagtagctgggactatgggcacgtgctgccacgcctgtctaatttttttgtatttttagtagagacagggtttcaccatgttggccaagatggtcttgatcttctgaccttgtgatctgcccaccttggcctcccaaagtgctgggattacaggagtgagccactgcacccggccagttttacagtttttaaaatgggagaagcttccacacatttagatgctaaaggaaggaacagataggaaagatttaagaatcaggagagaaaagagacaatagcttaagattcccgactatggggtagaggagaatgcttagaaccaaggtggaggaattggtcatttgtcacatttgctgacattttactgacattttctggctggatgtctgtctccttcactgggctgtaacctcctgaaggtgaaggctgaaattctatttgattttatatccctagcacttagtgtaggacttagcacgataatgtgccctctgagtgtttggctgggctgacgtgtcacttgtggtaggaaggtctctacagatgtgttcccttaaggatatagactgaaggccttgaatgcttaggaagctggggattgacttgaggtaggtagggcttcttggatagattttttaaatgagaactatgaaatggcaaagctgtctggcctgttaggttagtaactttggctgtttatgcctgatccaaagccctaggctaaaatcagtcatggtggagataaagagcaacctacaacatgcaagtcaagaactaccacagtgaattctctccttcttagctatctccttggtctagaaagaaagatgaaccccacagcagcaccccacaagaagagaaacagtgctcactcatttgagtctacttctcatcagatctgatgcaacttatctgcacaggccatgaatggaacaatgaaaagatgacctgaaatctttccccactcagttgctgttaaatttaacacagacataaaaattaagaaattcagtgaaacaattatattgcatttgtatttttcttctgcactgccattaatattggctggtaaaaattattccatacttatttccatgaattttgaaaagacttaaaactgcctgatatacttgggtgatattcttccaggaatgataaaatgagacagaaatggcctttgagtgttttcaggaagggaaaatggaaaatgaaagctggactaaaaggtgttacaaaagcaaactagttaatacttccaagaaatgaatatgctaagatattgtttgctgatcaacatttattaaacatttactgtgtaccactgatctaggctcttggccagatatgagcaacaaaaagaagatagtgtagtgcttgccttccaaaatctagcacagtcctagaaagaattcaggtttcactaaggctacttagggagagagttctctaggttctagaaattaaggcaggcacccacacaaagactcagttgcaaatgggtggaaagaatgatttttattaatcagcacaatatcttaaaaatcccagtgtagccttctttgataaaagacagagtacatgacttagaggcttaagaggggtcttctactacccattctggatttctgttttgagacttggaagttctaaagtccttgcagaggagattctgaggcccaccagtagcctaaaatctccaggcctgctcccctcactgcccccactcctgggtggaacacagacgtagaagatgctactcagctcagtggccctgcccaccatgcacctgaccctgtgaatgcctgtggctggccgttcaggttagttcttcttccctcctctcccacaccatggagacacaggaagagaaggaagatacgtgtttttctctagtgctgacattagagcctgagactccggccttgcatgaggccagatgggctaaggtttctatgctgggtttttcgagatctccccagacccttccagcaaattcctctttttactcgaggaggttttggaaacaaatgagtaagacagacgtagtctctgtaataagagaatggtgagtcaaggacacctgaaaaacagtaatagctaaggtcggacagaatagaagggaaaaaaaaaaaagcaaaaagagctctggagacacaggagaaaatgaagctcagatgtctgggaaggcgagagtatctaaaacctttaccagagaagactggagggcctctttgggagatgaaactctctgtcacctggagattcaccaaagactctgaggctgaggggaacagtatactgtggaactgatttctgagaccacagttggaaattgtgtgttcagagtccttacaagtctgaaaaggcctttatttttacagccacacttgagtcaccatttggctgtagaattctccctcagaattctgtaaacatcactccattgggtctcctggcattttatttccaaataagagagcaatgaccactggtttctttgcacttggcagacacctgattttggtgaaggtgttggagtgtcttttgttgggagaagtgagtgtgaggagggtgggggagtgttctggaagtttgtaggatttcttgtaggattcttttctgtcatttacaaatttcaacagattatctgtaatatggcttttttcagtattcctgcccaacaatccttagattctttaaatatgaaatctagattttcttctattgagaaaaatgttaacttattcttgatcattccttcatttgttttctggaatttctgttatgtagaagttatcatatattattcttcctgtttcttaattttctttcataacttctctgttttttaggagattccttaaattggttatctgtttcacagttgccaggtttggtttttggcatattattctgctacttaagatctccactatttttttgttttgttttggcgcccatgattttactggaaaaatccttttgttctctccttttttgttaccccttttcatttatgtgacaccttcctgaaaattacccctccctttgagatttaaataaaatgtctggctcttcatcccattcttgatgggaagtttaatgcctcccctaactcctgttttttttttttcttttcaattccaagaggttttgtacttggtccccacctaggtccaattttctttgtcctagatttcctaattgtacctcttcttagagtctgttcttacagcctgtcctggtgcagacatggaacacatcgttttcctttgtgttccccaaatggcattctttcattccattcaccttgtgtggacacactttgctgaaggtctgaggtggcgaaaagggtggcgtcacagctctccagagagtattcatgtgttttaaaaagtcctccatctgccccattaccagggatttgtcacctaccaccttactaacaaggctcctcttctgtcctgttgaaaggaagaatcactaatggatgctagcagggcttagtacctaggtgatgggatggtctgtgcagtacctgccatggcacgtgtttacctgtgtaacaaacctgcacatcctgaacatgtacccctgaacttaaaagttggaaatcaaaaaagagaaagggcctctgttctctgcctttcttatcttccagacagaactccctttacctgaattctaaagtcctctttgtttctatctgatatttaagtcaaaaagatgttgccacacctgttctctccttcagagaattcaggttcctgctattataatccctttttattccttgatgcactaaatttctttttctgaaaattcttccttgttttctttactaaatctatcttgcagaaagatatctttgccctgattgttcagcttatttctggcagctaatttttcccatatgtctaatgtttcttgtataagagaaaatagatggcttttatttctaatcagaggtctatttttctcaatgttggcaaatcctgtgggttccctaagcaattgtgcatctcagggttcagttccttctggtggtttcctgctttcttttcctatgtgaggcttacgtagaatttatttaacatgcaataaaatatgcacataacatgaaatatgtttacaatatggataaatcccacaatcataatggtaggagaaagaggccagatacaaaacagcatatgattccatttatacaaaatttaagagtaggcataaccagtctgtggtgatacagattagaggagtggctatcatttgagtggatgttgactgggaaggagttagctggagtcctagaaattttctatatcttgatgtgggaggtagttacatgaatgtatacctgcgtaaaaaagtcatagagctatacattcaagattagtgcacattactatatgtaagtcatacctcactttaaaaaatgtcatgtgatgtcatctagaactagggaaggaataatttgagagaccttcttgatttggagaggaaaagaatattttgagggcaggtgttacttagaagaattgctctacatagcagtcttttcttcctttatcctactatcagacatttctccaactagaataagatgtggttacaactgtcctcttgctgtttcgtgagaattgcttagttgtttcctacacagaattttaaacgttgtggtaaatacaagttcaaagtcacattgccagtgcttcggaaacttataatctagttggagagacaagactaacataaaagagaatttagtgttgcttttttttttttttaagtgcaaattttgaggcacagaattctccagggattcaggagaaagagcactcagtgggaaaaggaggaattgattttaatgaagcggggaggacttaaggtgagtttttgaaaatacctgggcaggcacaatgccagctagttcttcactgtattgtgtttgtttaaagaaacatagaacacctgcttgctagagctgaaacagtgactgggcaagacaggatatttatcaaactggggaaaataaaccaagtggcatacagatgtctgaagagatttagacttggattctgaattcccactagtctgagccctcagggttgagaggacagtacagtcaggggagggtagggatcgggaaggaacagaggccaggcctaaactgtatgccccggtgggaaatactatacagaggtcttttcttttacaacaaagcaattcttattatattacaaagaaaaccaaaatctgtgtttatgacaggatgacttacagaaggatacaaaaaattagggagtgatatattaagttctccttaatattttctcctctgacactacattcatgtatctgcaaaaacatacatgtgctttcagacacacatagtatgaacacacacacacacacacacacacacacacacacacacacacacacacccttcatactcctgtgctggtggggaattcggagtttatctaaagtacacacttcatactcctgtgctggtggggaattcagagtttatctgaagtgctctttgctaggctctgtgggtggagctgggagggtaatggtaaggttggcagatatatgaagacaactgaaattcatatcagcaggctgagtgttcatgtcaccagaagtctgactcgcctgctgtgctcttgcctgctgtgctctcgtaattactttcggaaaggttttctggctacaataaaatctgattaaatttgttaccaagcaaattgaattgttcaggctgcaacctttctagaagttttaaacgttatttaaaagaagatttcaacctcactccatttcagctttctctggggagctgctcttgtgctgtttggcccctgcctactcggaatggaacaaaggtatggtgtgtattgtttttctactgaatttaggatatttatttttgatggtttgtcttcacgtcttctgtaactagatataagaattgagagttcttgctgggggatggggagggatttaggatgttaaaacagttttcaaatatatagtgtttgccatcttcagaacacctgatttacaattcactcagttacttgggtatagaacttgcttgtatcgcaccctgcttacccttgatattctatctgcttgagccctctctgcaaccctgtccactttacccaacccccttatcagcaacactgccttttctgtatacttcccttcttttttctgtggctgctagcagatcttgtttttggagctttccttctgtcaagacattacttactgctttgctcaggtctcagaaagctttaggatccagagagatactaaaggctgaatgggcatggaagacccagggtttggacttgaggggtgctctggactaaatggtacactgaattcatggatcaaaagtgcagttagtcttaaagctccaatcaatacaatgttgactacttcatggggtaagtaagatttttgtgggctggttagaacttacttgccattcgcaacttgtttttatgggaaaatatcaagtgcagtataaaataaacatttagaccactacctagtcataaaggggggggtgctttctgtagtatatttaattaaacacatattattataacattttgctaagttctagttctcaagtaaatataaagctgttctaaagatattttaggagtggtgacatgtttaaatctcaggtttataaaaagggttgtaagaatgactgttgtgagccattagtttcaatgttgatttattctctcaacaaatatttgttgaaatcctcatgtgcgctaggctgtgggggtgcaacggaaacctaaaacaaacttggttccttcccttgcatagcttacagttttctaggggacacagatattaatcaaccaacctcataattaaaaatgaaattattggctgagcgcggtggctcacgcctgtaatcccagcactttgggaggccgaggcgggtggatcatgaggtcaggagatcgagagcatcctggctaacacggtgaaaccccgtctctactaaaaataccaaaaaaaaaaaccaaaaaattagccaggcgtggtggcgggcgcctgtagtcccagctactcaggaggctgaggcaggagaacggtgtgaacccgggaagcggaggttgcagtgagctgagaccacgccactgccctccagcctgggtgacagagcaagattccatctcaaaaaaaaaaaaaatcagtttgaaagtgatgagagagaaagtgatgtgaggctgtgtcacggtgggatttgaccttatatggggagtcagggaattcccagtggggctactgattgaactgagacctaaagtataaggcattgggggaacctgctcccagtatttcaacatagtttctttctattttccataagtgtcggctggctgagaaataaagggagacagtacaaagagaagaattttacagctgggccgccaggggtgacatcatgtatcagtaggaccatgatgcccgcctgagtctcagaccagcaagtttttattaagggtttcaaaaggggagggggtgtaagaacagagagtaggtacacagatcacatgcttcaaagagcaaaaagcagaaccactgataagggtccaacaaagatcacatgcttctgaggggacagggcaaagggtaaaagcagaaccactgataagggtccaataaagatcacagggcaaaggacaaaagcagaaccactgataagcatctatgttcagcagtgcgctgcatgtattgtctttttttattattattaaattttttattttattttattattattaaaattttattattattattattattaccctagaactttaagttctagggtacatgtgcacaacatgcagatatgctacacatgtatacatgtgccatgttgatgtgctgcacccattaactcgtcatttacattaggtatatctcctaatgctttccctccccccttcccccaccccacaacaggccccggtgtgtgatgttccccttcctgtgtccaagtgttctcattgttcaattcccacctatgagtgagaacatgcggtgtttggtttttttgtccttgcaatagtttgctgagaatgatggtttccagcttcatccatgtccctacacaggacatgaactcatcacttttatggctgcatagtattccatggtgtatatgtgccacattttcttaatccagtctatcattgatggacatttgtgttggttccatgtctttgctattgtgaatagtgccgctataaacatacttgtgcatgtgtctttatagaagcatgatttataatcctttgggtatatacccagtaatgggatggctgggtcaaatggtatttctagttctagatccttgaggaatcgccacactgtcttccacaatggttgagctagtttacggtcccaccaacgtgtaaaagtgttcctatttctccacatcctctccagcacctgttgtttcctgacattttaatgatcaccattctaacaggtgtgagatggtatctcattgtggttttgatttgcatttctctgatggccagtgatgatgagcattttttcatatgtctgttggctgcataaatgtcttcttttgagaagtgtctgttcatatcctttgcccactttttgatggggttgtttgtttttttcttgtaaatttgagttctttgtagattctggatattagcccttggtcagatgagtagattgcaaaagttttctcccattctgtaggttgcctgttcgctctgatggtagtttcttttgctgtgcagaagctctttagtttaattagatcccatttgtcaattttgacttttgttgccattgcttttggtgttttagacatgaagtccttgcccatgcctatgtcctgaatggtattgcctaggttttcttctagggtttttatggttttaggtctaacattgaagtctttaatccatcttgaattaatttttgtataaggtgtaaggaagggatccaatttcagctttcgacatatggctagccagttttcccagcaccatttactaaatagggaatcctttccccatttcttctttttgtcaggtttgtcaaagatcagatggttgtagatgtgtggtattatttctgagggctctgttctgttccattggtctatatctctgttttggtaccagtaccatgctgttttggttactgtagccttgtagtatagtttgaagtcaggtagcatgatgcctctagctttgttcttttggtttaggattgtcttggcaatgcaggctcttttttggttccatatgaactttaaagtagttttttccaattctgtgaagaaagtcattggtagcttgatggggatggcattgaatctataaattaccttgagcataatgcccattttcatgatattgatacttcctatccatgagcatggaatgttcttccatttgtttgtgtcctcttttatttccttgagcagtggtttgtagttctccttgaagaggtccttcacatcccttgtaagttggattcctaggtattttattctctttgaagcaattgtgaatgggagttcactcatgatttggctctttgtctgttattggtgtataagaatgcttgtgatttttgcacattgattttgtatcctgagactttgctgaagttgcttatcagcttaaggagattttggactgagatgatggggttttctaaatatacagtcatgtcacctgcaaacagggacaatttgacttcctcttttcctaattgaataccctttatttctttctcctgcctgattgccctggccagaacttccaacactatgttgaataggagtggtgagagagggcatccctgtcttgtgccagttttcaaagagaatgcttccagtttttgcccattcagtgtgatattggccgtgggtttgtcataaatagctcttattattttgagatacgtcccatcaatacctaatttattgagtgtttttagcatgaagggatgttgaattttgtcaaaggccttttctgcatctattgagataatcaagtggtttttgtctttggttctgtttatatgctggattacgtttattgatttgcatatgttgaaccagccttgcatcccagggatgaagcccccttgatcatggtggataagctttttgatgtgctgctggatttggtttgccagtattttattgaggatttttgcattactgttcatcagggatattggtctaaaattctctttttttttttgttgtgtctctgcccagctttggtatcaggatgatgctggcctcataaaatgagttagggaggattccctctttttctattaattggaatagtttcagaaggaattgtaccagctcctctttgtacctctggtagaattcggctgtgaatccatctggtcctggactttttttggttggtaggctattaattattgcctcaatttcagagcctgttattggtctattcagagattcaacttcttcctggcttattcttgggagggtgtatatgcccaggaacttatccatttcttctagattttctagtttatttgtgtagaggtgtttatagtattctctgatggtaatttgtgtttctgtgggattggtggtgatatcccctttatcattttttattgtgtctatttgactcttctgtcttttcttctttattagtcttgctagcggtctatacatttcattgatcttttcaaaaaatcagcttctggattcattgattttttgaagggttttttgtgactctatctccttcagttctgctctgattttagttatttcttgccttctgctagcttttgaatgtgtttgttcttgcttctctagttcttttaattgtgatgttagggtgtcaattttagatctttcctgctttctcttgtgggcattagtgctgtaaatatccctctacacactgctttaaatgtgtcccagagattctggtatgttgtgtctttgttttcattggtttcaaagaacatctttatttttgccttcattttgttatgtacccagtagtcactcaggagcaggttgttcagtttccatgtagttgagtggttttgactgagtttcttaatcctgagttctagtttgattgcactgtggtctgagagacagtttgttataatttctgttcttttacatttgctgaggagtgctttacttccaactatgtggtcaattttggaataagtgtgatgtggtgctgagaagaatgtatattctgttgatttggggtggagagttctgtagatgtctattaggtccacttggtgcagagctgagttcaattcctggatatccttgttaactttctgtctcgttggtttgtctaatgttgacagtggggtgttaaattctcccattattattgtgtgggagtctaagtctctttgtagatctctaaggacttgctttatgaatctgggtgctcctgtattgggtgcatatatatttaggatagttagctcttcttgttgaattggtccctttaccattatgtaatggccttctttgtctcttttgatctttgttggtttaaagtctgttttattagagactaggattgcaacccctgcctttttatgttttccatttgcttggtagatcttcctccatctctttattttgagcctatgtgtgtctctgcatgtgagatgggtctcctgaacacagcacactgatgggtcttgactcttgatccaatttgccagtctgtgtcttttaattggaggatttagcccatttacatttaaggttaatattgttatgtgtgaatttgatcttgtcattatgatgttagctgcttattttgctcattagttgatgcagtttcttcctagcattgatggtctttaccatttggcatgtttttgcagtggctggtaccagttgttcctttccatgtttagtacttccttcaggagctcttgtagggcaggcctggcggtgacagaatctctcagcatttgcttgtctgtaaaggattttatttctccttcacttatgaagcttagtttggcaggatatgaaattctgggttgaaaattcttttctttaagaatgttgaatatgggcccccactctcttctggcttgtagagtttctgccaagagatccgctgttagtctgatgggcttccctttgtgggtaacccgacctttctctctggctgcccttaacattttttccttcatttcaactttggtaaatctgacaattatgtgtcttggagttgctcttctcgaggagttatctttgtggcattctctgtatttcctgaatctgaatgttggcctgccttgctagattggggaagttctcctggataatatcctgaagaatgttttccaacttggttccgttcttcctgtcactttcaggtacaccaatcagacgtagatttggtattttcacatagtcccatatttcttggaggctttcttcgtttcttttcattcttttttctctaaacttctcttctcgcttcatttcattcatttgatcttccatcactgataccctttcttccagttgatcgaatcagctaccgaagcttgtgcatttgtcacgtagttcttgtgcctggttttcagctccatcaggtcatttaaagacttctctacactggttattctagttagccattcatctaatcctttttcaaggtttttagcttctttgcgatgggttcgaacttcttcctttagctcggaaaagtttgatcgtctgaagacctcttctcgcaacttgtcaaagtcattctccgtccagctttgttccgttgctggtaaggagctgtgttcttttggagggggagaggtgctctgatttttagaattttcagcttttctgctctgttttttccccatctttgtggttttatctacctttggtctttgatggtgacgtacagatggggttttggtatggatgtccttcctgttgattagttttccttctaacagtcaggaccctcagctgcaggtctgttggagtttgctgtgggtccacaccagaccctgtttgcctgggtgtcagcagtggaggctgcagaatagtgactattgctgaacagcaaatgttgctgcctgattgttcctctggaagcttcgtctcagagaggtacccagcagtgtgaggtgtcagtctgcccctactagggggtgcctgccagttaggctactcgggggtcagggactcacttgaggaggcagtctgtctgttctcagatctcaaactccatgctgggagaaccactattctcttcaaagctgtcagacagggacattgaagtctgcagaggtttctgctgccttttgtttggctatgccctgcccccagaggtagagtctacagaggcaggcaggccttgagctgtggtgggctccacctagttcgagcttcctggccgctttgtttacctaatcaagcctcagctatggtgggtgcccctcccccagcctcgctgccaccttgcagttcgatctcagactgctgtgctggtaatgagcgaggctctgtgggcgtgggaccttctgagtcaggcatgggatataatctcctggtgtgccatttgctaataccattggaaaagtgcagtattagggtgggagtgacatgattttccaggtgccatctgtcaccccttcccttggctaggaaagggaattccctgaccccttgtgcttcccaggtgaggcgatgcctcgccctgcttcagctcacacttggtgggctgcacccactgtcctgcccccactgtctgatgagccccagtgagatgaacccggtacctcagttggaaattcagaaatcacccgtcttctgtgttgcttacgctgggagctgtagactggagctgttcctattcagccatcttggaaccacctgacacgttttgtcttgataaacatcttaaacaacagaaaacagggttcaagagcaaagaaccggtctgaccacaaatttaccagggtggaattttcccaaccctagtaagcctaagggttctgcaggagaccagggcatatttcagtccttatctcaactgcacaagacagacagtcccagagcggccgtttatagacctcccccaaggaacgcaatattttcccagggtattaatattaatattccttgctaggaaaagaatttagcaatatctttcctagttgcatgtacatttataagctctctgcaagaagaaaaatatggctctttttgcctgaccctgcaggcagtcagatgttacggttgacttccctttttccataaaaatcggtattattctgttctttttcaaggtgcactgatttcacattgttcaaacacatgttttacaatcaatgtgtacagttaacacaatcatgacagtggtcctgaggtgacatacatcttcagcttacgaagataataggattaagagattaaagtaaagacaggcataaaaaattataaaagtattatttgggaactgataaatgtccatattaagatgaaatcttcacaatttatggtcctctgacacagttccggccggtccctccgtttggggtccctgacttcccataacaataaggagagttaaatctgtgaggaagggatcaaaaaagaatattctgggtatagggttgtacattgaggaaatgaaagaagaccagctatcattaggaggaagaacatagtacaaaataagctggaggaagtgcgtaggggtcattacatatgcttcacctcctaggctatgttaggaattttgctgtttctcctaggaacaatgacaggagactgacgtggaaaaaaaggttgatagggtggaattattttaaatttccatttaatctatgttattctgcctcattcttcatgacattattatgcgttgcgtgcttgtgtcaaaacgtctcatataccccacaattatatacatctatatactcacaaaaatttaaaattaaataactatgttattctggtcattgtggaaagaacaaattagagaaagagtgaatgtagggtgaccagttaggggtctatggcggtggcccagagggccatggtgatggcttagattagggtgacagggaagatggttatgagagagaattaagaggtaagattaatggatttgacttagctatagggtagggagagaaagggagtcgttgaagataacaggttgtcatgaaggacatttgaaggatgagaatgagtgagatgcactgagctgaattttggatatgctaagtttcaggtgtctttaagacatccaaatagatatgtatgaaaggcagttagctatacagatacaactttgtggctcaaggtctgcccatatatgtgtttgaaagtcatttgtgttcaggagataattgaagccaagagtatggaggagactctgtagggaaaaagtgtcaaatgaacaggacacagaactgagccttgaggagctacaacattgaatgaccagatagaggaaggatccatctacaaagcaaacaaaaaaggactgaaaatgtaggaagaaaactagtaagctgttaggtgtgcagaaacaacaaccacaaaaagtatacctggctataaagaaaaggagaaagagaactagctggagggtctttggggctgaaatgctttaaaaaaaaaaaaaaggtttggaaggtttaaaaaagcaatgtaatgtagattccttctacataccattcttgaaatgacaacattgtaaggatagctgggcaatcagtggttgccagaggatatgaacagtggggatgtgactgtaaagggtagtccttgggagtttcactgaggaagttccttggtggtgatagaagagttatatgtcattttgtttgtttttttgagatgggggtctcgctttgtcagccaggctggagtgcagtggtgcaatcacagttcactgtaactttgaaacctggggcttaaatgagcctcctccctaagccacccaagctgtagctggtactacaggtgtgctccagcacgttccacaagaactatatatctttttgttcttcacattcctgtcagactttataaaacaaatggatccagtagggaacaaacacaatcattatgctgactgtcaggaatatagagggaaagaaaaaatgttagccttaaagtatttgaaaaccactgactgtatgaaaatgctacttccaggcacctgggctatggctcagatgctgatattaacacatcagaaaggtctcaatttagtgactgtcccacatgctccagccttcctgattttctctctctgtattttttaaatgacagagcctgaatatcgtggacaataattgaggaggatcagagagcccagccaggcaaaattagaacagacttgggtcttgcaggctatacttggtgagatctgagttcttgagaaatgtgtcacattcaggaacctgccttcactttttctgctacttattctgtaatggaagaaacagaccaccactgtgtgagaggggtccttcctggcttccctcctcacagctgtgtttcaaaggggaagagatctgtgaagggcaagcacaggcacagccagagcccacagagtccactgggaccagcatggggacaatcagagtctgtggtcctcctgcctactgcatgccctacactatcctgtgggggttggggtgagataactgctgtgggggaggagcactgtgactgaaggaaacatcttttctcagctgtgggcgtgcctaacctctgtctcaaacccaactctgcctttaccttggagtgtccagaaaagacagcaggggccaaatgacaagccaaagttagtgtgacatttccacggagtaggggttgcaaaattgccgttggaaagaggagaaataaaggccatggaaagaaactctagggaaatgacaggccttattcacagactatgtccagaataaaggagccccagggtcaagggtcaacagtaggcctcttggaaactagggtcccattggagtcaggaaataaaaaattcaagtcattcataaaagtcttgaaaggcatgacaatttctaacagttgctagaaatggtaccaactctgggttcttgggctgttaatgcacagaaattggcatgagactgaaaaagtttccccagacaaggcattattggagtttatacctggacataagagaggcagcacaagagagagagaattccctgactgaagccagtagggctttttttttttttttttttttttttaaattaggcaaagcatgggaattgacttcaggggtagggtatgcaggatgggctgggaaagtgtgaagggtagggtatgccagtcagcatatctggttacagtggttatcttcaataatgggcaacctggtgatctggctggctacagcaacagtgtaaatcaatggctcagcattccttacctatgtgggacactcaacaaccttggttatctcctaaggccagtttctggaattatttaagtaaaaggtatggttcaaacattgtggcctaagcaaggtagtagtgtgggtttgtggtgagtggggatgcacaaaagaatgctctagtcgatataggctgaagccaagctccgttcctacttggtctcagaaaaaggcaatgttttctttagtatacattggccaagaactcagacttttataaacttgcttgaccagttgtcactgcttcgttgtgatctcttctgccactgggaatggatttattaactacagggctttgtgttgtgggagaagatttagtgattccaagaaaggaattcacttttattaaaataggttaataattaaaacttcaaagtgctacccagccatagaagtttcctgaagaaagaaaacagagagtcattggccatatgaggtggagatggtttcatctgaagtgtggaaaaaacagataggcttgtgttctttcctgtggcaggtgtgggtaaatgtgtcccccccaggggcctgcccttgtccatagccctacagtgtcttgcaatgtaaacattttcttttccaaggatctggtagggtggacataaatccaaggctcataaagtaggaagaaaagggggtggcctgggagttcctagcaggcagatcctcctcatactcattgtatttccagggtggggcagtgcttcacacatagtaggagctccaggaatacttatcaaacaaaagaacaaaggtaaagagaagaaagggaggtcagatggaagaaagcgcatgaccaattcaaaaactagaccccctatgaagttgcctgcagtgatcaattttaccatgagctggcagcacagagaaaagttctggccagggcaacctcgaggttcctgaacctctgccccttttctcagcctgggactgaactccctgttttggagatctctaaaccaagtatacacctcattgttccaaaaacaaaataaaacaaaagtgcagtccttcggcatttataaaatgtgagttccaatgtagctgaaaactgcccacccctcagccttgcttaatgttttaatttttaaaatttaaataaattttgttccttcatactttacacttcgaattttggtgcctggcagaaggactagtccgtcgagagagaaagaccatgatacaggtggcgatttggccgctgtcctctttggacttgaggtccacaatgatgtggtcgttggtgttggggatgaacttgaagaatgaactttaacgtgcgcggggcccacctcccccatgtggctgacggaaatgtaaccgaagtcctgggtggtgctcaggagtcctcgctgcaccgctgggggcaggaccggcgctgcagcactttccagcaggcggactaggggtgtgaggcagcctggcggtcggatttccgtggcggccctgggagcattgcagctgcacacccagttcttgtggtccacgctgcccttgtggcctgccactctcacccattccacgttctcagtcactatgtcccctccttgcccaggctgcccccctacagacgctggccctccactgccatgaaccccttctccactgccccatcgccttcggagagaattacccgagacacggccttgctgccatctatctgataggtcacccctctcccatggtccatagagtagtttcccaccagagacgttcagatccgagagctccatgcccctctccactttccgccaggtgggactctagaatgcagtggtctttgtttcatttcaccaccaccctgtccctgctgtctgatagggttgggtatccccttttcaggtaactgaaccaggtgttttcttcttgggcccttgaccctgtgcccaggtcagcaatgactgcgactgggtattgaatcctacctggcgtcctctggaaggcaaccagggggtaagtgtcattgtccatggccttggtcatgggcgcaagcacaggaaggccccgcacacttatctggagagagcgcacagactcattccattccaggtggtcagagggctgggcaggcatgagactgaagggcaggcgggacccagtggagcagggagtccgacttccacccttagtaagctcgcctggcctgagttatgtgagagtagtgatggctacacaaattaaagcatagaataaaatttcatagaactgtatacacacacgcacacacacacacaaatagatgcctgtgaaaactggtgacatgagaataaagtctgtgctctagttaacagtattgtaccaatgtcaatttcccggttttgatattgtaatacagtaatacagttacataagagatcactattggggaagctaactgaagggtacaggggactctggactatttttgcaaatttctgtgagtctacgattatttccaaagaagatgttttaacaagtgaatgagaatgaaaaatatgaaatttgcaatgactttttctttagtattttgccctttaagtgtaatctaattattacaatcatcattattactcatgcatagtgtacaggaagcacttctcttattaaaatataactcaaaacttccagaacttgtcactggaagacactccatccaggcagtttggctgacttgaaagccaaacctgtttgcagtaggaccttccttaattatagcagattatagcttgattatacttggttatagcttgttgcaggagtgggctgctctctcttgagaggtcaaactttacttacaattgtacatcagaataagtgaggagtgagtatactttgaaaaggcatatttgaaacagcagtttcctcattgtttttattgtggaatataacatacagaacagctcaaaaaccataaatgaagaacacttagaaaatgaacaccagtttaacctaggttaaaaaaaaaaaaaaaagaaaatgtaatattacctgtgagcaccccagaaatctctcatatgctgctttctttctttctttttaaaatagctttatagataatatgatttaaataccataaaattcacctgatttaagtgtaccattcaatggtctttagtatacttaatggagttgtgcaaccatcttcacaatctaattttagaatttttccatcacctcatgaagaaaccatgtgcccttgatcagtcagtccccattttctgtctacacccccaccattgtctctgataaccactggtctactgtctctgtgaatttgcctattctggacatatcatacaaatggaattatatcatatgcggtctttgggtctgactgctttcatttagcagaattttttgagatgcatctatgttgtagcatgtattgtaatttattcctttttattgccaaatagtatttcattatatggatgtatacatttatccactaattgatagacatttaggttgtttgtactttcgggctgctatgagtagtagcaaagtgaacatttatatacaggtttgtgtgtgtgtgtggacatatgctttcagttctttgggtggagaccgaggagtagaattgctggatcaacagaaactctaacatgttgagaatctgccaaacctttccaaagtttatcaacaacagtgtttgttggttcctgtttctctgcaacctcagcaacacttgatattaccttcattttttcttatacctatcctaatggatgtgaagtaccatctcactgtagtttggtttgagtttctatcatgactaaggatggttaacttctattcatgcgcattactgaccatttatatatcttctttggagaagtttctattcaaatcgtttgttttattttatttatttaaagatgggagtcttgctatgttgcccaggctgctctcaaactcctgggttcaagtgatcctcctccctcagcctcctgagtagctagggctacagatgtgcacaaccatgcctggctcccctttgattatttttagttgggttgttttcttattattgagttttaaagttttttgtatattcttgatacaaggttcttacagatatataatttgcaaatattttctcgcagcttttgggttattttcattttcttgatggtgtcatttgaaatgcaaatgtttttaattttgataaagtcaaatttctcatttcttttcttcttttgcctgtgcttttggtgttgtatctacaaaatcattgcctgacccaaagtcacatagatatattcctatatttctaaagtataggttggtgcaaaagtaatcatggtttttatcttgaaaagtaatggcaaaaactgcgattacttttgcaccaacctcacaaatgactcaaagatgttctctatgtgttggctcttaagttgtttatttcttcacagcagactgagatccattggctcaaaggctgccagcaccagacttaaaattgtacacacacaattgttttaaacatagcccaaataagcatatttttagccatttagggcctgatctgcatactccatgaaattggcaatatttattatccatagataagataagccccagtgttataaagttgccaggctgctgctgtcctttgagttcactaaccctgagactccctgctgtgcctctgacttatcccctttcctagaagtttccttgctctcctccccttctgaatggtggtccctccaagactccggatagtttcaagatgtgaaggactcattcctcctgcttacttgctaaagcagcaccctgctaaagcttgtgcatgttgctgccagctcatcatatctttttcttcgatcagtccagaaattctggaactcactccctacagttttcctctaaaagtgttatagttttagctattatatttaggtctatgattcattttgacttaatttttgtatgtggtgtggggtaggggtacaaattatgcttttgcatgtggctattcagttggcccagcaccatttgttgaatacaggattattcttcaccccattgaatggtcttgacactttcttgaaaatcaattgaccacacacacgagcttatttctggactctcaattctatgtttaccttcatgccagtactacactatcttgattagtgtaatattgttgtaagttttgaaatggagaagtatgagttctccaactttgttcaagattattttaatcagagtcctttgtgtgttcttacgaattttcggatcagcttgtgagtttctgggatttagaaaggaattgcattaactctgtagaaaaatttggggagtactgccatctaaccttctgatctatgaacatggagtatcttcctctttatttagatgtttaattttaaaaatattctgtagtttgcagtgtacaagttttgtacttcttttgttatacttattccaaagtgtttattgttcttaattacattctgaatgaatttttttcttaatctcttttttgagttgttcattgctaacatgtagaaatgcaattgatttttgtatattcatcttgtatctgacattttgcctaacttgtctattagctctggaaattttttagtaaatgttttaggattttatatatacaagatcatgttgtctgcaaatacctttactcttcctttccaacttgatggctttattttgcctaattttcctgtctagaaccttcagtaaaatgttgaatggaagtggtgagagcagatatccttatcttcttcttgattttagggaaaaagtatccagtcttttgctattgagtataatgttagttttgggtttttcatgggttcccttaattagattgagaaaattactttctactattagtttgtaaagtgtgtcgttgtgagggggtgggagttagtcatgaaagggtattttttttcaaaatttttttctgcattataatttcttttgagactattatgtggtttttaccttttattctcttaatgtggtatattacataattgattttcatgtattaaatcaatcctgcattcctaggataaatcccaattgatctggacaagtttatggactatcagtactaatttttctctaaatgtttgatagaattcaccagtgaagcctctgggttctatgtttttctttgaaaatactttaaattactgattcgatctcttttcctgtcataggtttgttcatgttttctattcctttatgagtccattttggcaatttgtgttgctctaggaatttgcccacattacctaaattatctaatttgttggcatatatttattcatagtatttacttatagtccttttaatatttgtaggattaatggtaatatctcctctttcattccggatttttttgtaatctgtgctttatctctttatcttgttcaatctacctgaaggtttgccaattttgctgatcttttcaaagaaccattttttgattttactgattttctattttttttgttttttctacttcttttatttttaccctgttattattttcttattctacttgttttgggttttgtttgcttttccttttctagatctgaagttgaagtcttaagattattaagatcgttcttcttttctattatagccatttaaagctacaaatttgccccatgtcttgctttaattgcatcctacatatgtgctcctttctgattaaaactctctccttaaagatatatagtaccctgactcttgtaatatttttctcattttctgaaacaatacactttagttttcttgttagggaactttatttaaatggagtcacgttgcctctgtgtgtgtgtgttttgttctttttatccaatattatttctgggcattggtgcacgttgttacaagtagtcttaattggtttatttgtctttttgtgttccacagaatgctactttactgttatagcgtataatttacataacatataaatacataatttatcatttcattgttgatgaacatttgcattgtttccaatgtaatatactcaaatgtaatatgaataatgctgtgatgtacattcttgtacatgtatcttgaagaacatatgcacatatttctccagtgttgagacttagctaagagtaggattgttaggtgacagtatatgtgtattctctgttttagtgtagaatgccacactatttttcaatgagattgaacctcactacattgtcattagtaacatatgagagtttccatactcctattatcaacatttagtacttgcagttgttttaattttagttgttctggtaagtatagtggtacttcattgtggtttttattttcacttccccattgctagtaaggctgagctctgtttatacagttagtcacaatttggatattctattttatgaagtacctattcaaacctttttgcccatttttcttatagattgtctttttcttattgatttatagacattcttctatattctgcatagaaatcctttgtcatatttatgttgcaaattttcattatgtgtcttacctttttactcttttattgtgttttggggtgtatatgttcttttggtgtaatctaaaattgcaataattttccttttgggtagagctttttgtgttttgttgaaaaaaatccaccgtgtcccaagattataaaaaatttctcctaaataccttccaaaagcttgattgtttatcttttaaatgtaagtcttttaacttgtctgaaattgatttttatctatggaataaggaaggagtccaatctatttttccaatatgggatcccagttaccccagcaagtttagtggaaacatttatcctttccctagtgatctacagtgtcacttatcaagtgttggtgtatatgtggacttgtttccaggcctctatcctgttcccttgattattttatctaccactgagccaacactatatgatcttaattattatagcttacaataagtcttgatatttgctaggacaaatcctctctcatctcccaccttgttcttcttgaagaatgttttttctctttttggcccttggcatatcttaataaattttagagtaagtttttaagctgtaaaaaaaaaaaaaaaattctgggggttttattgagactatagtaaatctacagataaatttggagtaaattgattatcttcataatattgagcttcctatctatgaacataatataactcttcgtttatagatacacttaatatctctcaatagagttttataattttctccaaagagatcatcttttgttaaatgtatttcttgatatttcattttttatgctatcttttaatttttatttatttatttattttttgagatggagtttctctcttgttgcccaggctggagtgcaatggcacgatctcggctcactgcaatctctgcctcccgggttcaagcaattctcctgcctcagcctcctgagcagctgggattacaggcatgtgccactacacccggctaatcttgtattttttgtagagacggggtttcaccatgttggccaggctggtctcgaactcctgacctcaggtgatccacctcagccttttctgctatcttaaatgatatatttttaaattcaatttttgtattttttattgctgatgtgagaataaattgatttcttaaactattgattatatatctaacagctgtactaaactctcagagtcttataatttatatgtgggttcttctgaatgtttatgtatacagtcagttctaagtatcttcaaaaatgattttttttctttccactccttatgtgtttgacttttttttttcttgccttaatgtgctgagtagcttattcaggtctctttacttttacctaatgtctttttctgtttcagggttacatctaagataccacatcacattagctaaggagctatcatgtctccttaggcttctcttggctgtaatatttacttagatttttcttgttttggatgaccttgagtttcaaggagtacagaccatgtattttataggttacctctctactggaatttatctgattttttttctcatggttagactgggattatgggtttgcaggaggaagaccacatcatattaaagttacattctaacataatttatcaccgttgatattgacggattgtcacatttccttactgttaaagttactctttttttcatcatttccatactgtactctttgaaaggaagtctctatgaaaggaagtctctatgtgcagcccacatttaagaattgattatttcagattttctacataggcaatcatgttatctgtgaacaaaaacagttttacttctttcttcccaatttgtataccacttatttatttatttgccctattttattgtctagaactttcaatgcaatgtagaaaagcagtggtgagagacgacatccttgccttgtccttatcttagtaagaaagcttctactttctcattttttgtagatgttttaattaattaattaattaatttatttatttatttaagatacagggtcttgctctgtctcccaggctggagtccagtggtgtgatcataggtcaccccagctttgaactgggggctcaagtgatacttacatattggcctaccaagtagctagggctatagatgcatactgccatgcctggctaatttttttttttttttttttgagatggagtctcactctgtcacccaggctgaagtgcagtgccatgagctcagctcactgcaacctccgcctcctgggttcaagcagttctcctatttcagcctcccaagtagctgggattacaggcgtaggccaccatgcctggctaattgttgtattttagtagagacggggtttcaccatgttggccaggctggtcttgaactcctgacctcaggcgatccacctgcctcagcctcccaaagtgctgggattacaggcataagccaccgcacctggcgcttttttatttttattttttagcaatggggttttgctatgttgaccaggctggtcttaacctcctggcctcaagtaatccttctgtgttgacccccaaaaacacttagattaatgggtatgggctgctgtgcccagctgtaaatgttctctatcaagctgaagaagtttcactgtatttctagtgtgctgagagtttttatcatgaatgagtgttggattttatcaaatgcatgtgatcatgtgacttttcttctttagcctattgatttgatacattatattagtgacttttgaatgttgaaccagccttacatgcctggaataaatcccatttggtcatagcatataattctttttatccattgctatatctgataatattttgttgagtatttttgcatctatgttcatgaaagaaattagcctgtagtttttttttcttgttataactttgtctgattttggtattagggttatgggctcatagaatgagtcaggaaatattccctctgtttctgtcttctggaagagacttttgaaaattggtataaattcttctttaaaattatagtagaattcaccagtacacccttctgggcctgatgctttctgttttagaaggttcttagttaccgattcaatttatttaatatatatagtactactcagatagtctatttctttttgtacaagttttggcagattgtgtctttgaatggattggtctgtttcacctaggttatcaaatttgtgagcgtagagtttttcatagcattcctttattatctttttaatgtccataagttccatagtgttgtcccttctttcatttctgatattgtattttttgtttttgtagacacagggtctgttttttttttttcctttgagagagggactcgctctgtcacccaggctagagtgcagtggcacgatctcagctcactgcaacctctgctttctgggctcaagtgattctccagtctcagcctcccaagcagctgggactacaagtacaagccaccaatgcctggctaattgttttgcattttttgtagagatggggtttcattgtattgcccaggctggtcttgaactcctgagctcaaagcaatccgcccacctcagcctcccaaagtgctggcattacagatgtgagccaccacacctgccttagacacagggtctcactttgttgcccagactggtcttgaactcctgggctcaagtgatgcttctgccttggcctcccaaagtgctgggattacaggcataagccactgtgcccagcctgatattaatatttttgcatcctccctctctctctcttttaaaatattagttagcctagctgtgggcttatcacttttttgatcttttcgaagaaccagcatttggttttgttgcatttctctattagttttctgttttcaattccattgatttctgctctaattttcatttctttttttctgcttcctttgaatttaatttactttcctttttctagtttcctaaagtggaagcttatgtgattgattttagatattgagtatcacagggtacagtaggtgaatttttcttcttttaaccatggagtacacattttgttcgtgtgaggatattctttaattcactagatatttactgagcacctaccacgggacaggcactgtagtcttggccttcatagagtttaccttttcttgaacagaatactgaacatcttcccattgaaaacaaaatacctaagacggggagcaaaatgtacatacagactgaaaattctgaatgagttgccttttcttcctccaccctttttctcagattatgaccctctggaggatttctagcttcataagtagtctttatttgggctccttgccctgcttggactgcaagtatagttgacatttatatcattcctatccttgcctctccctcagctctgagcttagaagccccagccactggtctttgaagagatcttcagggtgtgaggtgccatcagagcatgaatgaatgacatttttacctcataaaactctactcctctctgtatttttttgaggtctagattttgaattttcaaaataagtttcaagagcatcactgtttattccataggccctcgacatagtaaaccaatgacatttttattaatataggtattttctgtgatctctagtgaggtaaattttaaaaattcgtttgttacacacttatatctggttcctactaatcttcagaaaaagaacaggatggagataagtcaggtgagatacatacattgactatgaagctgacttctaactagttcctagtttagatcataattaagcatcagaaaataacagagcccaggattagggtgagacaagtgagaccacttttaagttgtagaaaatttaaggaatgtaaaaaaaacttgattaaaacaaattattttaacacaatattttttcattttttttttcttttgagatggagtctcactctgtcacccaggctggagtgcagtggggcgatctcagctcactgcaacctccgcctcccaggttcaagcgactttcctgcttcagcctcccacgtagctgggactacaggtacctgccaccacacctggctaatttttgtatttctagtacagacagggtttcaccatgtaggccaggttggtctcgaactcctgaccttaggtgatccgcttgccttggcctcccaaagtgctgggattacaggtgtgagccaccacacctggccaacacaatattttttaaggccaaaatgaacgcacaaattccatgacaaacgaaatatccaaaacttaaagacaggatgttatactgccacactgccattacttctgaggcaaaaaggaaaaagcgtgcccctgtataaatgtattttaatggttattttcaagaatattaatgtatttgaaaaaatattgaaatgttaaaaagtaggtgtattaaaattcattttagttttttttttttttttttccaaaaattgcattcaaatgtattttacactttaggcagttcttaagaagggagagtgcggttttttgacacttaacatttaaaggttttattggccacattaatctttctcacaaaagttttaggttatctataagttcttagaatgtcaaagaagagaagaaaaactgactaactttaaggggcggtggaagaagcagcaacttggcaataattccgcagccaacttcgcgtgttcaggcatcctttttctccagtaaaattttgtgcaactcgtctgcatcctcgctggtttttacccgaatcaacatggtgactggcatggtggcattcttctcgtcaattggtggatttggaacacagacgataagaacgttattcttccctgttcgcgtacatggcatattgggtggaatcagaacattcagcaatatgttgcctaaattggtgtctgcccgcaccaaaagctgtgtcttctgatttgctgtaggttttaaatgcagagtacctatgcctttctctttaaactcattgtctttcttgtaaaacagtttacactttttggagtaaaaagcatcttcttttacttcggtaactactactttgggcggctcatcattctcttcttcatctccacctttgcattcaccactgtcaccttccgcttggccctccaatggtttagtgggaaatggtgaagagactggtttactctgggtagtatctttgccaaataaactggagtttccaggggagaaagaaaatccagtcagggggacagagcttaatgagcccaaaacagagctatcaactttcttgtcgaaattaaatgaggcacttgtcgctcctagtgatgatgggtccgttttcttttcagatgccacctccaccttcttgtcaggtgtatcttcagttttgttgccatgaaacaaaaacgttgactcttgctgtaattttgttgagccaaaaagggaaggagactgtgtttcagccgccactttgttagattcactttcagaattcctgccactgttcccgtgttgctgttcaatgtttgctaaatatttctcatagtccttaaagataggtgtcagatcacagagggggtttgtattcacgtgcttcactatccaatcccgcacggagcagttcaaggcggccaactgcttgtgataggcatttccgacacaagctttactggaagcaaggccagaggaggagggctgctgactgtccccattagttttgggatttgaaactttatcaaccaaggcggtagggccatttgcagcaagagaaccaaaggctaccttgggctctgccgctgcctttgcactggtgaagggaggggcactggttatgttgtttccattcgacagtccttccaaaggcttccctccagcgccactaccaaatccaggaaagcgtcctcctccagaaggtaccaccaaacctttaaaacctttaaaggctcctccagtgtcagattcgaatccaacatttctgcgctttgctttctttatggctctattcttcaagacttcctcactggccatggagaatgttcccacctcttaagcttcatcttcttgatcccaattcctatctgtcagttccttctcggcatttcttttggccgtgttttcgaacctcctcggcggccgccgctgcactcgctgggtcttgggtgcggcgaaacccagggcgcagcggcgcaggggtctggagcccgcaggggtcgccgggctgagcgcgctcggccgcttccggtgctgcgctgcggaactcagaggacttggtgttcggcaagcccagagactcaaacaccatgtccatggagggggggtcctcacgctgtgttcagcagggaggcgagagcgccggttcagccagagaccgctgggggaaccgcgccgaacacgctccgggcggccattttgtaactcgaatctacccccaaaaccaattcgaaaaaaggcaattcattttagttttaatgttttatagcaaaacaagaatttgctacagttttatttttctgattttgatagaagcaaattcattgatatctttaaaaatactttggggaaaagctaatcatttaaacaatacacagaaaagcatgtatataggtgcacatatttttttcttttgccttctgctccaatgtgactttcacgtggaactgaggacaaaagtgtggttgagtgaacctgttctacatggttgtgatataagttgaaatctaacagagaactttggctatatgaattcattcaatggaacaacaaaaatctagagaggtttgccttttaaactcttagactaattattccaggaattgcctcagtgcttatgttagcttggtgtcagatatctgtactcgtaagaacaaagtcaaaaaagaagtcatgaaatttagaatggcttcttcctgtcaaatacatttagaacatatttttggaataatttcaagtccattgggaacacaattactaggaatttgggacagaggtgacaatgagaatctgctttgagaaagtagatcataatattacagagctatgccttcatcagtttaaaattggaagtggtttctctgttattttctaccctggagtgttcttaaaattatttttatctcctttaagaaatttgcagcgcttctaaaaatgaaactgaaagtgccacaaatatgcttgtgctccaaatcagttttaagttaacatgcaaagagaattttggctactttttgtttggagtcaaatataaaactaaacaacatgtgcccagatttcctaccatggatttgcaaaagctattttgaaacctttcttggcagaaatcatattctgttatgattcagtgttgcactgtaaacagagtgtttagaaattggggtttgagaagtgtaacggctagtttccttaaaagaaaaaaaagattcaaatgcttggtttgcggctggagctttttgtaaattaatcaaattgagtgcagtgggaggggtgattcattaagtagagagctagtgaagacatatcctgtgaaaggcagtgggctaagtggtagggggagaaggaagatacagagtgctttcaaaagtgcctaaatgtaagtcaacagggcagtgtgccaattacagtgttataatgttctacagaagagggatgtacaccaagaatgccagcctggacctctggtgtgtcttggaagacttaaccaggaaggggacgattcgtttctatttgacccaagactgatgctgcgtggtgaaggagaggaactgcgttccaggcagaggaagtccagatgcgcaagagcagagatgggagggacagcacagtggcttctcagaattgaatatggtgttagacttctaaaagagctgtggtagagggagaaaactgtcaaaggaaatcagtaactgttaaaggaaaataccttaaacgtcctgttttcaggctgactaatgccttaggggagcaaatgagcaacagaaacgatatgagcaactgctgttctttcaaaatacccaggcagaggaaccggcagacgatgggcaggcaagtaagagggctattagttccctagaaaagtggagaggcatatttaacaagtaagaagtatatttacattcatatcagggtggggagaaatgcatcctcaggtagccactaaacctgggtacttggaacgcaaggggcttacaaaatattttagggaaaaggggttttgagctgtcagtttgaaatgattgtctcttaaaacctaacattattaaccttccccctcaaaatgtttgccttttcatagcatcgaacaaacaactgagatcctgttgtgcctatcacctgttgaagttgccagtcttaaggaaggaatcaatttctttcgcaataagagcactggcaaagactacgtcttgtacaagaataagagccgactgagggcatgcaagaatatgtgcaagcaccaaggaggcctgttcataaaagatatcgaggatttagccggaaggtaccaagagtcctttgctttctctcactggtgacctttcttgcaattagatttggcaggaaatgtgttcatctagaaattttaaatgaaccaataagcaaattacttcccctagaaaattttactcttgcgtgtttaggccatttctctgatctaaaagttgtatgttctatttaattttcctctctcttataagaactctaatttaaaatttattcctgacttgataaatagtaaaacctctctggggtatgtgtgtgtgtgtgtgtgtgtgtgtgtgtgtgtgtgtgtgtgtgtttgggtgtgcataggtaaagcacacatttacctggtttggtattcaaagacccaagcctcctatgggtctccttcctctctctcccataagtgtgtgtgtgtgtgtgtgcgcatgctcctgtgtgtgtgcatgtgtgtataggggggctcttttccaaagcctgctggacagcagatagaattttcccgggaggctagttgtgattactaaacaaaaatagcagggccccgactgttcctgccctgaacagtgactcttctgaccatttcctagaactgatattgttgccaacttccctcccatcccctcccctcctctactgtcccttccccttctctcccttctgtatagatcacctctccccagtgcagcagcaataccaggacaggattgttttgttagtttttttctcaatgactgccaaagaaatagcaacatggcctggcagagtcagatagcgctcttgggcatgtgttttgtcagtctaattctcaacaccagtaactctgtgagtgtttaccccacctttcaagctttgctttagcctaatttgccctatgtggctttagtcacttggtattaggcttttttcttccactgtgttgtcaatcttatttctcaggtcatttaggggtagtttagtgctggtgcattcagaataagagctgagtagttgtccacgagttacctgttacccaaatctagaatgctgtctaacgttcacacagatttactttgctctgtacctagtatcaaggcccagcccctcatgttatttgatttttaaatgctaactaaccactatgaatcctgaagacctgacacaggtctcagttaatttagaaagtttattttgccaaggttgaagacgtgcacccaggacacagcctcaggaggtcctgacaacatgtgcccaaggtggtcagagcacagtttggttttatacattttagggagatataagacatcaatcaacacatgtaagatgaacattagttcggtctggaaaggtgcagggagggggcttccaggtcataggtagataagagacaaatggttgcattttttttgagtttctaattagcctctccacagaaggcaatgatatatgcatttatcttggtgagcagagggataactttgaacagaatgggaggcaggtttaccctaagcagttccccacttgaagttttcctttagtttagtgatttgaggggcccaaaatactttcacatttccccccttttctttttaaaaatctgttggagaacgcattttagaagaaaatgagtctctggcctcaggtttcgtctgatctctcatggctaggatggtttattcctagatagataggtcctgagttattaggaaagctcctttttagaaggttgtgaagtctcatgtcctgtgaagagaaaatagggggaggacaacaacaaacaaaagaacaattctggaaaatagatatatgccacattactctgaagtccatacatcagtaggcaggtatgaaagtggcttatgtatgtaaataggtcgctgctattttcttctgaagctcaagttgtttagcttcatttcacagggctttatgaaagcacatcttagtttccagtgactccaaatttggaaaaatggaggaaaaaaagaaggaaaaaaattgaaaacattattttgaagacatgtagctaagaaaaattagaattcagtccaaactgtagaaaataataaaaattgaaaaacattacacaagactagaatctaacaatagatgtactatagtttttgaaacataatttttctctctcccctttcccatttttatgaaagacaaatcatggcaggactggttttccttattatacttggcctaattctttgtatacagtgcagcaagaataattattttttatataagcttttaaattggctttgatggaactttttccacagaaggaatctcagagaagacttttttaaagcacagcccagccatggatttgtaccatgaaatacctatgagttgggtgaattcctctccttttgagctcctaacaaaaacctggggctcctgggcctgtcagtaagtgaccttttttacttaccacaggtcaggaaccctgtacagggactgtggagacaaaggtatgaggctagtttttccaagggactttttattggctccataagtcaagtttaattctttaaaggaaagcacactatttcagtcaaagccttggtaaaataaccagtttcttcaaatgtgtgctgttacaaatgaaaacagattcttattgcacttatgcaaataactgtattgtcataagtaaagaatactcacaaatagattccaaattctgtagaaatcaggtagttttaaaaacaaatatgctccaaattttgttcaaaggagtatactccattgttaaaagctgtaaatagcttaaaagtttcttgattttgaaaaacaaattatcagcaacattttaagcaaaaagttaaaaaagattacttcaaacttctattagtttagtccatgcagttaattcttgttctgcttgatattcatgaacatttcagctctccatgagtcctcgaagttttttctctattttgatgtcacagtctccagagctatcagaaacatgcattcaagaacacctgttaagagttttatagctgattataaaactacctctgaaaaggaccaaaaaaagatgacaattgtctgtgaataatgaaaagttttagggcagccatagtcagacattctgttacctctgtagcacacaataatttaacataaaaattataattattactgataacatacagtgtgtcatatcagaataataggagtttcccataattttggaatacatactaataacatatttatacaaatacagcccaaagaaaaccaaacaccatttcatattggacaatgcttcctgtataattttcataccaaaaaagccaaatatgtcacttttggactttagggaacccattaataccatcttaaaggactaattagttcagaaaaagacataatgtataatttgatttcagaaagtttgtcaaatatcaaaggttttaaacacttaatatcacaaaataggattacaggtcattgtaaaataagtcattcatttagccaaagtgataaggatttcaaaacaaaagggcaaaaaccttcattctttgagagagaagacttaattttctaaacattaagccctaataaaaaaacagcatgaagccaattagttttccaaaattttataaacaatccataaaggtttaatcttgatcataagatatatcttccatgagccttttatatctttgtaacctttattaaggagttggttaatgttttaagaaaaccttgttaatttgacatgggttgatatgctggtcttgcatcagtgtgcctttgacattaatggttaatttatagagaaactgaactcattttatctctaaaaattaactttgtgatctcacaagcccacctcttctgcaatagcccctgggccttgaggagttaaatgcctttaatttctggccctgcgtctcaggaatgcagtttattttgattggcatcttctagggggcctggagatgaggttttaattgctgtcagtgtttgagatttagcaggacttggtgttctttttagacccaagagtcaaagccctgtaactcaatgtcacaaggactttaaaagcacatacaggaagatacaagaatgtaataaccttaattaaaaaaacattttacatctcagtttttcctaaggaaaccaaacttaataataatggcatgggagttattttgataaatgtaaaatctgttaggccagttaccaaaaggcaaaagaaaataccttctgcagtgcacagaatattatgttggaagaaaacaattcctttagacctttaaagaaatgttgttagcatcaggccaccaaaaaaagaaactgagcagggaaaaaaacttatatgagctgaaaattagttgaaggggagtgttactatttcacactttttaaaagaggagagaaaaccaaaaccagcgagatgtaatataagtgtataagtggcattttttttaacatcaaacccaacctctagaaagaccattattatttccctttaatcataggcaacttgatcatataaaagtttttgttttgttttgttttttataaatcttcttcttgtgacttatacagattgttcatgacatgcttgggctttctggtttgtcttgaactaacttccttccttcctttctctctctctctttctttttctttctttcctttgttttttttgagatggagtctcactttgttgcccaggctggagtgcaatggcacgatctcagctcactgcaacctccgcctcccgggttcaagtgattctcctacctcagcctcctgagtagctgggattacagatgcacaccaccatgcctggctaatttttgtacttttagtagaagcagggtttcgccatgttggccaaactagtcgcgaactcctgacctcaggggatccacccgccttggcctctcaaagtgctgggattacaggcttgagccactgcacctggctgaacatccttctttcttaaacagtcattttactctaggactaaatttaccatacaagattctttctcatatggaattatttctctttaagctttcttaccgaaaaaagctctttatttttataacttgctttacatgtcttttatttcttggttccttttaccttgttttgtacatgccctttaaataagctttgaattagacaaaaagtgttcaccttttttaaaaggacatactgctttttttttttagaaagaatgttttcctacaaatatatttttattggaaaatgcccaaataatgaaatatctattatttaatataactttagattctaaattataatgagtttgtctacaagtatttatcctattacatttacctaattattttaatcatttacctagatcacttgtaaaaactgcgattgtcattatttgaagttatggaattgccattgcaaaattataactgagacagtgaaaaagatttgacctaactgactccatcctgctcttgcttctaacctccaagctgttcttgttcatttctggttgtaggtaggccaaactaattttgggaggaacttagtttatagtttagctttgaaacaaagatagtaacagtcctttcccaaaacaaactttactgctcgtgaactagactgcctaaagccacaagattagaagttatggtaatcttactaaattcaagatgttgctattttaattaaactaatatcagtgtcttatttatgaaagattacacaagtaaagatcattctgtcttgggctgaatttatagttttgtaacccctgtgccaaagtttgacaccttatagtatttggcagggataataactatgaaactgcttgattaataaatgtaaacaaaaaatgtatgctggcaattcttaagacattcctaatattactttacgaataatttttaaagctagcttatttattaaaaattttacttaagttatgtaaagttgaaaaagcattttactagtcttttcttctctcctgataatgtatttatttatgtatttatttatttatttatttattttttagttagagtttcgctcttgttgcccaggctggagtgcaatggtgtgatctcagctcactgcaacttctgcctcctgggttcaagcaattgtcctgtctcagcctcccaagtagctgggattacaggtgcttgtcaccatgcctggctaatttttttgtatttttagtagagacggggtttcaccatgttggccaggcgggtctcaagctcctgacctcaggtgatctacccacctgggcttcccaaagtgctgggattacaggtgtgagacactgcacccagccaacacttttagtttcttaagccaattaattagagctctttcatacattttcagtagtgaaacagtgtgtacacaacatgtaaatacatagatatattgggcatgctgatagaaaagtacatcttatagatttatagaaacctttttttccccttagactttcagattcctgataaactgtttcacaaccctaggcagttgtcagctaaatagccttaaatttgcatactaaaggaaacaactcgggtgaaaatgatatagcaaaagttacatcataaggtacagagaggaaaaagtctggtggtgttagagggagattaaaaatggatgccaaattaaacataaaattatagaagtctagcataggattctataaggagactaattttatttaggtagggaatgactacctatcttttaactggatctctgagctctgggcagagcccatactgaatcctgggtctccaaaaagggagaattaatatgagattaggctacgtggtgcttttacagtgcactcagaaaaaaaaaaaaattaaagacatttctaagtgtctaagccacattcttccttaaaaacccaagagtaacctctgttgcaataactattttagtcaaaaaaaaaaaaagtaacacaatacaaaagtaagctgttcgagaactgagacaaacttgtctgtttacattcttgaaaaaatttgttttccctggaaagggagtctggtgccttctccattttctttaaggaaccccaggctattataaactattttaggtcctccatgcagcagagggtgcaagagaaaggagagatagtagaagtaaatgaagaaaacagaattctgtcaactgaaaagaaaaaaacttttgctcaaaaaaaaaaaaaaaaaaagacaaggtcccaggagaaaaacaaaaacatgaagtccttttaaatacaaacacacacatatgcgtgcgcgcgtgcgcacacacacacacgcacgcatcttggatgttaggttttaattaagctgacttttaaccattgagctccttaaaaaaaaacttttaaaatctcattaccatatttcagctaggacaaattgctgctatttcagaagtacagccattgctctttcagtttggcctggctaacaaaaaggtggccttgttatgtaaatgaagacccttagaataaaaaatttttctttttgttttttttttttttcctttttctggccattttttcccctccaccccataccacgtgtgtgcgtgagtgtgtgtgtgtgtgtgtgtgtgtgtgtgagagaatttagccacttcagaggccttgttccccataatttggaatttcctttggatttgatcaagttggatagagttgatcaaacccaatgggaaaaagtccaaaacaacagtgaaaacaggaatgaacaacaacaacaacaaaaacagttaagcaaaacaatcacacaacttatatcattactgagtactctaatagtaaggagaaattaagaccagctggttgttaatcttaactttagccaagacaaaccccaattcagttacttagctagggatgggtctcagggtgtagactgctctctaccatactagaagcagagagaaaaaaaactcatcttccctgttggaagtgagctcaaactccataaaagagttacctgtcttccatagccatggaaacaggaaatcttcccttcctttttggaagcaagtaaaagtttttttggaattttacttgctttttttttttttccagcaaaataaactttagatctctaccacatttggggacatcagggattctctggagggggtgctctcaggcctcagcaaattgtcctattggtttgagccataaagttagctcatgctggtaccaagcatagatttgtcaaaggtcaggggcatctccactcagaatcccttcatggttaccaaaatgtgaaccctgaaaatctgagacaggtctcagttaatttagaaagtttagtttgccaaggttgaggacatttggccatgacacaacctcaggaggccctgatgatatatgcccaaggtggtgagagcacagtttggttttatacattttagggagacaagagacatcaattaacatatgtaagatgaacattggttcggtttggaaaagcaggacaacttgaagcagggagggggcttccaggtcataggtagataagagataattggttgcattcttttgagtttctaattagcctttccaagggaggcaatcagatatgcatttatctcagtgtgagcagaggggtgactttgaatagaatgtgaggcaggtttaccctaagcagttcccagcttgactttcccttttagcttagcgatttggggggcccaagatattttcctttcacaccagtattgcacctgtagcttgcttggctcctcagatagggctgccagcttgaccaataaaaatacaggatgcccagttaaatgtgcatttcagatttaaaaaaactaatgtatttttagtataaatatgtccaaagtagttaatgggacacccttttagctggcaactctgctctaggagaacctctaagtaattccctgatggcccattttgatgttcttccatcttctgggtggattcaagtcagtgaagcctcagacatagttctgtcactggtaaacttccgccagcacttcaaggtgttggagttttctcttccaactattacagctttgggactctgtctctgggtttcctctcctagttttttaacttagcgggccatttcacagagtgccacttagccagccatttaaggaggccttaaagtttactgattaagagcatcatctctccttatagactacctggtttagaagcctgattccacgacttactagctaggtcataaccctcgacaggtttcttagcctttctggacctcggtcttctcatttctaaaatgaggatgaaaatattacctactttgtcaggttgctgagaggattaagtgatgccaaacacataaaacttaaaagaatgccatatggtggtatatggcaagcacctcaaaaaagtgaattatagttactatttctctgcaatgagcttcttgtgtagcttatatagagggacttttttacaggaactcagattgtttttgtatctaatatgctcatctaagtatagtgattgctttcccacagactagcctttctcttcttcattcaaagccttacaggtgattgacctgttctcttgacacattagtcctcccctcttagctctcctgcccatgaggaagcaggttctgccagctttattcccagatgcagctcaccaagcatttgcacgttgaaactgcatttctgtgttaacttatgctctgtattctcccatccacttctctgagttcagtaaattatagttggattctcttcgtagctatttatctgaagaaactgtcttttctagtttctaggttccagccaagaacagagacctacctgttctacccaccattattcagccatttttcttctcaacacaaccaagatcaacaaatcctataagccatgattctcatctttaaagcctatcaatttttcacaacctcctctaactggaaaactgttgtctccctgtcatctatgaccgcatggttctgccaattttccctttcatggcctggcatgccaaatagctgcagttggaatgttccatcagaattaattgaaaggttgttggctacttatcaatgagaaaggagtcataaaataatccttcataaattgaagcgtggaatatgctttttgcctcataacttggagaacatgaaataattctggatataatgaaattcagaaatatcagcatgattcacttatgttaaagtagatgtttttagttttaaaaaatttggtgtttctggtttgcgacagatttctttatttaaaaaaattctttaactcttaaaaccaacaaaaaatcaccagaaacaccaccaaaatagaaaaaacggaactatttatatcccacctctagccactccgtccccctcaaagttgtggtaagatggggaaaagatactgagcaacctgttttattacagtctggttctcatgctaaaacagggttgctagtgttaaataaaaatacaagacccttggttaaatttaaattacagatttatcaactaattttctgaataaatatgtcttaaatattatagaaatcatatttaaaaattcattatctgaaatccatatctaactgagcatcttgtattttatctcacatatatgctgtaaaatcttaaactataagatcttttctctttgaaatatgtaacctttggttgactattctaggggtcaaggatttcagagtgatgtaaattatagatatatatttactactacagtttttccttgtattggccccagttggatcttatccagcttggcttttataaaagaggtgtttctgaagacttctttattctgctgtctctgttctctaaaatgtgtcattttgtgacatggagtttatcttcaatttattaattttatttctaaaattacctattgatgattaggctttatcttcaatttattaattttatttctaaaattacctatttatgattaggcttttttttaatatttaagtattagctattgatagtttttgttttaactaattccattataatttaatatcattatgaaagaatacatttaagcctaataaagattaatttttatttttaccatttcttttttttttttttttttttttttgagacggagtcccgctgtttagcccaggccggattgcagtggcgcaatctcggctcactgcaagctccgcctcccaggttcacgccattctcctgcctcagcctcccgagtagctgggactacaggcgcccgccaccgcgcccggctaattttttgtatttttagtaaagacggggtttcaccgtgttagccaagatggtctcgatctcctgaccttgtgatccgcccgcctcggcctcccaaagtgctgggattatagacatgaaccaccgcacccagcctaaagattgctttttaagattaggaaagaaaaagaagtcagaagaagccaaattggtaccgtaaccaggtggatgcctaatgatttcccacagaaactctcacaaaattgcccttgtttgatgagagaaatgagcaagaggcatttttatggtgtgattctggtgaagctttcctgggcatttttctgctaaacctttggctaactttctcaaaacaatctcataataagtagatgttaccactctttgtccttgcaaaaattcagcaaacaaaatgccttaagcatctcgacaaactgttgccatgacctttgctcttgagcggtctggctttgctgtgactggaccacttccacctcttggtagccgttgctttaattgtgctttgtcttcaggatcatactggtaaggccatgtttaatcttctgttacagtgcttcgaagaaatgcttcaagatcttgatcccactcgtttaaaatttccactgagagctctgctcttgtctgcagctgatctggatggttttggcagccatcaagtgcaaagtttgctcaactttaatttttcagtcagaattgtgtaaggtgaatcaattaagatgcctgtggtgtaggctattgttcgtgctgttagttgttagtcctcttcatttggggcataaacaagattaattttttctttgcaaatggatacggatggtctgccattgcaggcttcaacttgaacgttgtcttctctcttcttaaaatgagttatctatttgcaaactgctaatttctttggggtatacatgcacatgtaaaattttcaaaaagtacaaaattaaatagagtaaaaactgaattttctctccttctctgatccctagtcaccaagttcccactctagaagcaactaccattattatttagtttcttgtgggtccttctaggggtatcttttgcatttgtaaactagtacatatttataatattcccttccttagtagcagactgtatacattgtcctccactttgcttttttttctgaatggctcttgaacttagaaagcaaaagaaagataatattgaatatccctgacaagcaaagtgttgacccagaagctgctagtgagacttcaatttctctttccctcccatccattaataaacacagagatttctattttgtacctgggcatgagggagaaaaaggaagggaaattgggtggtggagtctgtggtttgtggggagctaaaaatgggaattgttctggcccgtagaccaggttggattgcccaagctcaggaaagtggcaatcagaaaaataatggcactatttttaggagagagttggaggattcgtgggaagtaggagatggccagaactcgttatctgacaaagaagagccatttcacgtcctggtgtccacatgtgacacacaattggagaggaggctatttcttctacctacccttggaacctagcaatgatgtgacattcctcaaactcctaggcagacaatgtgaaagattataagccagggtaggaaaagagggaaaagcagacaccaagcagttacagatcaggttgtgggcatgtgtgtagcatgcttctggggaagtccccaaaatacgttcgggacacttgaaaatgtgctaatttctagtcagcaaaacagttggggctcttgccatcatcatttgtgcataaagatagactgcaactttattttatattgtcaatctggtgaggcctgggaaaattgggttatatgtaaaaatggaaaatgctaaatatacaacatatgcaataccttgtaacaggatggtgaaatggaagttgaggttgcaaaacaacagatgcccattccaaattgaagttctgagaaaggatttacaaagaggctgagaaccagtagatcattcttaaatccctcacccttataaggaatactaaagcatagaaggggagtttgaaatataacttcttaggaagagttatttggaaagctgtactgagagtccatgccccttgcaggggcaacttctgagggatgccggcccctctccttaggccagaatttagctggaccacctctagagagtctgatatgtgttctccaaggttaagggacacagtgggctggtgtctgattctcccctgagaaatctcaaggatgaaagattggccatgtagctgtgacagacaagctgaaggagaagaggttgtgttaggcacactggcactcccagaattcagtggggctagaacagttgagtgtttcctatggatgtgatgtggaccatgaatgggaggcataaacgtagagtcattctaggtccaaaaggcctgcagagaaaagttggatgtattgctacgttgctaggggctaaggaaagcataagtaaccaggtagcatagagatacccaggtgcagagaacttcaggtgggtgtttccaagcaattggacggatcctcgcaataacccactgaggtatcccttagaatcagctttaagcaaaagccaagcccagatagtgctgctgctccgtgaccaaaggacctttgctctctttctttaactctcctttttcctccagctccatgtctggaagggtcaggaaccttggatgaaggcatgaggggagaggaggaatagaagcattgggtgaggccaggcatggtggctcacacctgtaatcccagcactttgggaggctgaggtgggtgggtcacctgaggtcaggagtttgagaccagcctggataacatggtgaaaccctgtctctactacaagtacaagaagtagctgagcatggtggtaggcacctgtaatcccagctacttgggaggctgagacaggagaatcgcttgaacccagtaggcacagaggttgcagtgagccaagatcacaccattgcactcaagcctatttctgatacacaaagcaaaaaaagcatgttataaacattataaatagaatgactcaattatttaaaaaatacatgcataagcacatgtgggtgatataagagcagtcttagattacctgttaagggagctgagctggaagcttcctgggctatgcctccaggctgtgggctttgaatataatacctttaaattttttttaggctcaaattattataggcatactatataggcgtgaccactgtcacccatgtgtctctgtgagaccaacaccaaatgcctttttagacaagagtgtgttgccagcattctcccagttctcctacaaacaaaggtgttacttattgaggtatgtgtcctttgccattcactacaaggaaatagaatgctattttgggaagagttgctaagtgttttgactacaaattcatcgtccctccacgtctcaaacaggacacctggaccactagctattttctccagtgaactccaccctgaatctgttgacttagcccagaaagcctgccagctgccttattactaggagctggttatgtgtgctgtacaaatactgttaaatttatttgacataaaactgataataaacataggtttgggtataaacactgttagtttgtgtaagtgaaaggacaagagactatgaactttatgaatatataaccaagtaatctacaactgcttaggggcttttatgaaaatctctaaatcttttgatcaagacctttacagagacactgtagcaaagtgttaagagcaaaggcaatggggccttctcacctgggtgcggatccaggctccaatagacagtctggggacactgggcaatttagtcaatccctttgtgctttaatttcttcaaatgtgaaatagaaataatatttttagtagccgtcttacaaaaaacaggttgttataaaaaaatgtttaatttaatgcctgttaaattcatggtagttagtacacagagcataatttatttgtatatatatgtctcaaataatctgcatatatccttgggactgggaccacaggagcagaaataagggatttccctcccagcaggaagttggatgcactggaaaattagattaaggctactgttaaccatcatgcaggcaaaaggcagggccagagctggcagcagggtcagtgggaggacaggaaataacaaattctgggaatttcagccttagctggagtgaagacactgccacgaagggaacatttgttaacagagctcactttttagtccagtgctaccaacgctgtagggatttcataccacattctgagaaagataagggcttgatccacctggggacatgttatcagtgatgagcatctgattttattattattataaaaaataatatatgttcacaattaaaacgttggaattcagaaaagtagaaggaagaatctcacctacacttgcatcacccaaaacattttagaatgttttgttctggtggttgctgtcctccctctccccatctccttcctccttccttttctctttctcctcttcctcctcttcttcctcttggtaagaaataatctgtgtaccacaaaatttacccttttaaactgcacacattaatcctttttaaaaaaatattcaaacgttgtgcaaccaccaccactatctcattccaaaacattttccgccactcccaaaaaaaccctgtaatgattgtcgtcctcattccccttttctccaagacactgtcaaccaccaatcttctttctgtctctatggattttcctattctgaacatttcatatattggaataatacaatatgtggccttttgtgtgtggcttctttcacttagcatcatgttttcaagattcatccatgtcatagcatatattagtacttcatttacttgacttttatggctgaataacattccttgtatggatataccacattttggctatgatgaatacttttcctatgaatatttatctaatttttatgtgggcatatgttttttgttctcttggttataaacctaggaatggaattgctgggctatatggtaactctatgtttaactttgaggaactgtaaaactgttttcaaaaggactgcatcattttacattctcattagcaatgtatgactctgtttctcctcatcctcaccaagacttgttattatctgtctttcttgttgacatcttttgaagcacaaaagttttaaattttgatgacatctaattttttttctttggaccttgtgcttctggtatctaaaaaagtatatggttagaataactaagtcttttattctaatatacttattagactaacatacacacacatagataatagtctaagagagagtctaagaaatatatctatttctctctctctgtcacccaggttggagtgcagtggcatgattacggctcactccagcctctgcctcccgggttcaagcaatcctcccagcttggcctcccaagtagctgggactacaggcacataccaccatgtctggctaatttttgtatctttttgtagagagaaggtcagactatgttgaccaggctggtctcaaactcctgggctcaagagatctccccacctcagcctcctaaaattctgggattatagatgtgagctaccacgtgtagccagtctaagaaatattttttaaattgcctaatccaaggtgatgaaaatttattcctattgttttaagagttttatagttccagctcttatatttaggtctttgattcattttgcgttaatttttgtacattgtgtgatgtaggggcccaaattcattcttttgcatgtggatgaattgcagcaccattttctgacagactattctttcccctattgaattgttttggcatctttgttgaaaaatcaattgatcataaatataagggtttatttttggactctttattccattgatttatatgtctatccttctgccagttccacacattttgattactgtagctttgtagtaagtttttcaaattgggaattgtgaatccttcaattttattttctttttaaagatagtttagttactctaggccagcttgtcttgagtctttagggtcagcttgtcaattcccagggggtgaggtatggggggggaaagcagccagaattgtgattaaaattgtgttgactgtggattaatttagggagtattaccatcttatcaatactcagtcttgatccatgaacatggaatgtctattaatttattaagtcttctttaatttctttcaacaatattttgtagttctcagagtataagttttatactactttgattaaatttattcctaagtattttattctttttgatgctattgtaaatggaattgtttgtaaattttatttaaaaattaacggctagcgtatagaatattgctgattttcaaaataccttgtatcctttgaaggttttaatagtttcatttgtagatatcttagggtgtcctatatacaagattgtgtcatctgtgaatagagacagttatctttttcctttacaaactggataccttttatgtcattttcccgttcagttgcctccatgtagaaatggaggttttagccaaggaaactgcttgtctggttcctgcttttagggggaaaacagctgtcaggttttcttagatgcctttttttttttttttttgacggagtctggctctgttgcccaggcagaagtgcagtggcgcaatatctgctcactgcaacctccgcctcccaggttcaagagattctcctgcctcagcctcccaagtagctgggattacaggcacgtgccaccacacccagctgatttttgtatttttagtagagatggggtttcaccatattggccaggctggtttcaaactcctgacctcaagtgatctacccaccttggcctcccaaagtgctgggattacaggcatgagccactacgcctggcctattagttttctgagtgtgttttatgacaacaggatgttggatttttttcgaatgccctttctgtgtcaattgagatgatgatgtggtttccttctttgttctgttaatgcagtgtgttacattgaatgattttcaaatgttgaatcagccttgcatctttcaaatattgaaccagtgtggcataaagtccacttgttttatggcccaaggtaaagtgttctctgtatgtctattaggtacagtcagtttatggtgttgttcaagtcttctattccctgttaatcttccatctaactgttccgttctctagttttcttgttagacttaatttttcaaacagttattttatgtaaaccatttttgcatcttgtgaatattatgatattagacataatgtcagattctatgcacatataattttatgttcacattaaatattaactaatatatttagccatttttctgttagaatttaagatcatcatagttttatttaaaattaaaactggtatttttgcgtttaagagcttctctgtatttggagttgtttcataaggtagttgaattactggtaaaatagtatggcaattaaagcattcaccaccaaccttcatatacttcagcctgaaggtgggcttcacatggcccaatagcctcaatgtgaaagtaatggaagacatataggagtatatttctgcaatctagagatagggtggcacttcttcactctttggataacacttcaaaagtacagctcatagggcaacaaaaattttaaatatggacgaatatgattttattaacatgagatttctgcttaatgaaggagaccatggacaaaattgaaagacataatgacaatttgagagttttttgcaatgtttataatcaacaagggattaatatcaagcatagagtaggaagtaatgcaaattgacaagaaaaagacagaaaaataaaaagggaagaaagagtatgaactagcattttaccgaataaacccaaaggctattaaacatatgaagatacttactaagtagtaatcagaaaactgcaagtgaagcaagcaagtttcactttacatcatttagagtagtaaaaagctagaagctaagatgatgccaaacgtcagagacgtagaagtcctcatccatgtgatgggagtgtggctgttgcagccattctgaagagtaatctggcagtaactagccagatgagttttttgtttgttgttcttgtttctttttattttgttttgtttttagagccagggacttgctatgttgcccaggttggacttgaactcttgggctcaagtgatccttctatctcagcctctctagaagctgggagtacaggcatgtgccactgtacctggcttctgatgaggtttatgaacatactaggatccataaatcctgctcttgtttatacctcaaagaaattctgttgtgacagaacctaggagtctacccctgggagagtgaatttgtaaaatgtggtagacatgaaccgtggaatactcaactgcagttagatgtgggctagatgtacacatggcaacatcatgggtgtcaaaatcatagtgttgagtgaaaaacagtaagaaacagattggagacctaatgccatttatataaattaaaaatgcacacacacacaatataatacatattttgcacaaacatttagaatggcaccttggaggggaggaaaatgagaatgggaactagagataaagggaataaataaataagattaaaaagaaaagagctttgcatggatcagatacatgtcatgaactagaaagtatgactaacacaaccctttccacttgatgtcctaaacgaatgaatgaatgaatgaatgagttcatcatatgtgccttctttaatatgtatagcattaccatccattctttgacactgacaaatttttgctcccactgactggtttatgagcgtgccttttctccccataccttaccagctcagaacattcttagtctttcagactgttctcatttgaggcaaaaattgcatctcattgtttttacttgcatttttctgtcaaatatgatgctaatatttcactaaatatagtttggcaaaatgtgtttgctaaattgttttggtgttagaagtttttcattttacatttgtatctattcagattttccactgggattatttccattgctattaaatttaaaagtcctctcatatttgatattctattttatacattttcatggcttggtcgttttgtgtccttaatcaactagaatacttagagaactaattgccacagcaccatgttagatggtccacatatttatgataccttctttagaataaacagttaacataattaggatccactttttggctgacctaatgtcaataatcagtgatttgattattatagttttatggtatatttttgttccatttcgccttcattattcttccttaaaaaagattttagggactaccatttgtttgttttttctggataaaattataacccaaatgacctagattttatcagcttgtaaggtcaaattaataatactatattctcatgaatttatttataatagttggcagatgtcacattcttcgttgcatctatgcaatttatctttgtgcaaggagcatagcgatctttatggtaattgcttcagaacgatgattaagagttacaattgcttcttggccttttggctaagatcaagtgaagaattacagacttatttttttctgcatctcttgaaaaagaaaaattaagaaggggtagctatcagtgcaagagtttcctgagggtctcccataatacaattgtatttttctaacgagtttgctagtatataggtttgtttgtcctacaatgaacttttaaagttctatatattcctttaagtataaaataatgaccataataatactattatttattaaatgcctgctttgttccaagcatggtgctagacactttagtatctattatttcatctaacctccacgacaactctatgaagttatgtatcataattttatagatcagaaaactgaggctcaggatactgctaataagcagcagaaataggattcccacccacatgttcccaaagccagcattttttctagttcatgactctaattttcaacaatcatataaccttgaaataataatatgtaccttcattataccacttgcattttcaggaacatcgttcaataatgcattctttatgtattcctgattttattaagaaagccatttgtgtttcaccattaaataaggtgatagttatgactaagaaaaatatttttattacattttcttaagcaatgtttaaaaggtattaaaaattaagtgaacacccatgtacccagcacccagcttaagacataaaatattaacaacagaatatatatctttccttgattatatcacatatcctcccacccatgctctggaggtaatcacttttttgaatggggcttcaggatagctattctctattccctcagctttattgaggtataattaattagcagaattgtatacaaatgctcctcaacttacacatggtgtgaagtcctgataaactcatcataagttgaaagtactgtaagtcaaaatgtagttaatacacctagcctaccaagcatcgtagcttagcctaacatgctgtatgcatactcagaacatgtacattagcctgcagttgggcacaatcacctggcaacatggtccactgtagagtatctggtgtttacccttgtgattgcacatggctgactgggagctgcacccgctaccgctgcccagcatcttactgtgtatcactagcccagaaaagataaaaattcagagtatggtttctactgaatgtgtgtcatttttgcagatcagatgcccctccctgtgcattcccatagcgcctcgaagtcatctctatcaatcattcatttagtcgtaaggaagtcttgtttgtatatgtgtatccctgacatgactgagacctcataagttctctaagtgccatatgaataaagaaatgaattggtgttcatcttaagtcatagtctctgcagatattgcttgatctaagggagtggcaccctttgttttgattttcctttgatctttggaagaccatgcattcctatttcagtgatgcttttaaaaagccatttttgtcattaatccagatttgttctcatttgattctagttgttgaaatggatgaaaacaacggacttttgcttttagaactgaatcctcctaacccttgggacttacagcccagatctcctgaagagttggcttttggagaagtacaggtaaggaaatattaaaaggataatattattaaaaacaaaaacgtgaccaagatgtccatttaacatctatatctgtaaacatcctatattaccttgaatactgtttgagatgggtatttaggacatatggtaaaaagtcatatgataaaacaaattctttaaggaacccccagaacttggcagggattacaaggaaaaaaacaatacaaaactttgggaaaaatccctaaggaaactcatgcaaaactatttgatgccagatcactactggatagaatggctggttgtattttctggctttagaagagaatttccttcagaggaaacactttaatagtttgggagaggtacacaatcaaaaatttatttttctgtgtatttaggaagtttatgtatatttgggcagctaattttaaggaaacaaatgagaacctgcccggaatagacataataaaaactaatctatgccttgacctttcctcacccactttgttgccttttcacatgacgttcccgctatctcatctctgcttctcaatacattccttttccatggaggtgccaggctgtggcaagagaatgaggaattggatttggaatccccatggtgccagtctctaagtcactgtttgtgtccattcttagaggaccttggcatccagaaggagtaattatttaacaggtaatttagaagagaaagtcttgcaagcctgttcagccagttgtcagttgagtctgcgtggctatgccaacccaccaaactcacgagaatcatccattcatattgctcttcacagccactctggcatttaaatccccagatgtttgtgataacatctctaactgcctttccttgtaaagtatgctttaaaggactgatcacaaaatatattcttcagtgtggactgtaaataactgtttaggaactaatttaaataaactaaaactaggtaaacaaattgatttgtcatctaaaactaaccatgagaatttatatttgaataaagtcatgacctgtgctgggaaccgtgttctatgaaaggctctttttggaatgtatttgagtccaagattttgcctgatcatgcttagaagcaaagtactccagcctgtgtactatgtcagccacccaaaccaaacatttcagttcattgttgctgaccagtaatgaacgattcagtaatagggatctcactctcttttaacagataacatatctcactcatgcctgcatggacctcaagttaggagacaagagaatggtgtttgacccttggttaatcggtcctgcttttgcccgtggatggtggttgctccatgagcctccatctgattggctggagaggctgtgccaggcagacctcatttacatcagtcatctgcactcagaccacctgaggtaatgaagtcctgagcacacaactcctaagctcatgctgcaggaaaggcatcaaatgttctccgattcttttgcaatcactgctcactttgaagtaggttcagttgggatgatgaaaaaaggactaattaagataaatatttacatttgcatagaaagtttatacttttaaaactgtttctagaaagacaaatatggtatgttctaacttataagtgggagctaaataatgtgcacaaataggcgtagagagtagaatgacagacactggaggtttagaaaggtgagggggtagcaagtaggtgaatgatgataaattgtttaatggataaaaggtacatgattaggattaataatgctctgatttcaccactgtgcaatctttggttgtaacaaaattacacttgtaccccataaaattatacaaatagaaaagcatttctacactttacaccattgggagtgaggaaggagctattgtaaggaagataggggaggatgaataaccgtctcacttcccaccctaaggcagaacacattttctataaagggccagagtgtaaatattttaggctttgcaagccatacagtgagagttgcaaccactcaaccgtgctgttgtaacccaaaggcagccatagatggtcctgaataagactgactgtgttccaatcaaattttatttatggataatgacatgtgaatatcatataattttcatgtattacaaaatatcattgtccttttgattttctttacaaccatttaaaaaggtaaaaaccatctcctcagctgtgggcaagcttcaaaagaagaaagaagccactcttagcttgcaaggttgtacataaacaagtagcagcaggttggattcggcccacacatggtttgccaagccctgatttatagtatcctaacactaaacacccaacgtagtaatcctgactgaacctcacccaatgtttcattggaaccagagtaatatgatactaatgatagcaactgaaattttccctgacccagacaattaaaaaggagggagaaaggaggactttaagttaagaaaccacacgtatttgcaaaggtactgagctattagaagagggaagctcatattctcaattcctttgcttaactatagggtcatatttcttcatcattattttgaaatttgtatcacttctgctagattgccagtataaacacacagcaatgcccataatgtgctactcaagcaattcgactttgtttttctgtgaccctacatgacaaaatggttagggataacatgttggttgctggttgactggccccttgatattttattctaaagcatatgggaactctaaagtgtggatatgctctgatttatttttcagggaagtgtttgtttttgtttttgtttttgttttgtttttttgaattaactgatttagtaacaaattgcctgcaacatatttcttaactgatcacaaccccctaggatactgtggtactacaactaaaattctactttatatgatacctttgtcccacactacctcctggaactatacttgcataatttcaggattacaagagccctgagttcatttgttgtacaataacagtaaagtgtggtaataattttatatagcttgtgtagggacaacagcacataaatgatatgatcgctttatagtgtctaagatacaattacctaaagtcttaatgagagacattctatgggaacacactaaatttaagaagggtaagaactttcagggagggtaagaactcatttagttgagttattctgtaactactgtcctgaaaaccaatttagtttcatttcaggggcttgtgtggacagttgtcatgcattaaaacaacagttttcaactatagtatcacaacacattggttgtgcagtgtgttgcagatagtttattattgaaaaggggccaaagcctgtgatttttactccgttgggtctatttccttgatagacccttacttttcgactcttgcctaatcaactaataaacatcaagattgcttgtccccgacccttctgtctgacctttatttactgaataaagcctccctggtttacaaaaaacaagggaaaaggccagtgtactttggtggattgccagtaagaattattagcaattgaaaaatccaaagcaatgaacatccattttaaaataacttaccgtaactcccaaagtcctttaaaatgcaggatttcgttgctgaacccagagattgaaggtacattcaaagaatcattgattttttgaatcttttgttttttggggagaaaggttgttgctcccctcacttccttccagattctacttatttggatagcttttaacgcaatgctggaacttgaatattagtacagccaagtgttgatatgcagatttttaaaatacttttcctatgattatatatcttattttacctgatcttatactctgtgtacaagtctgattcttaaaccagataatacgttcattaaagttagaaactttcttcttatagaagaagcactaggtttagaatcaaaaacccaaatttgaataccagtttactgtgtgttgtatatttctgaatgtttcctcatctacaaaaacaaaaaattcatagctttttgataagaattgactaacatagtatgtaaaactgccccagcaccaagtttgaaatataatagatgtgtaatcatttgtttgtttattaaactttctaccacaccctacagtggtataataactctgttatataatgaatgctcaataaataaaagccgacttaatatgtctagatagtcaaaaatacttggatgattgttgtgcactgagttgggattactacaaatgttggatgtagttcctcaacactaaattttactgtcttgcctagctggtaattctgtccctccttaaggatgaataatatagtctgttaaagtgtggctttaatatacaaaatatattatttatccttaaaaagggacagaatctttgaaggttgaaaaaccaacccccaaaatggtccgagacatgggcttttgtcctgtactatgtcccagtcctctctcttactgagagctactgcttgaagcatgcaaagaaatgaggatctccgtgatcttcatttctttcctctacagcatgactttttctcgtctgtgcctactgttagaactacccctccttcaagcagcatcactgtggaaaatggaacttgcctacctggttgatgtccacaccatgagcatttgatatgttctaacaacaaagatgaatcccctcagaatctcccgtcactttcacagtcatccttgaacagaaacttttctctggactctggtgagagtccagtttttcaattcctcacttctctgtcaatatgttggtataaggaacaaactgtctgtcatactagatgacactatttttttctcttttcaacctttccatctgtcttatcctagttaccccacactgaaaaagcttgctgggagaagaccagatattcccatttatgttggaaacacagaaaggcctgtattttggaatctgaatcagagcggtgtccagttgactaatatcaatgtcgtgccatttggaatatggcagcaggtcagaaatctgctttctttccatgctttccagttatgctttctgtgatgaatgttaggtgagatagtcaccgtaagattaaggaaaaaatgggtcaatgtggtatgtccctgatactgcataaacacaacctctatttgtgattcaaatgttaggcagactgtcctgggcaaagatgattttctttctattaacccatactattatagtacaactctacagaacaggtaataaatctagttctgaataaggaaatttcttcaaatgtgaggttcaattgaccagtctttccagaacaggtgattaccttctcaaatactgaattaaaaaccaaactgaaattcacagttgttggttttgttgttaaattccaggtggacaaaaatcttcgattcatgatcttgatggacggtgttcatcctgagatggacacttgcattattgtggagtacaaaggtatgtttttatccccattgataacgaaaaatggaaaacattcttaataggaaggatggtaatatctatatgaaatttcatcacatgttcatcttttagctccattttgaaagaatatagcgtgttatatccttgttctagaaatatggagctatctttcaaataatttttccagaaaacaaattagaaataatgtcatctagatagtgacaggagcaaagatttctttcataaggcaatagatattttacattccacctatagtgatttcttcaaaactacatttattaaataaatgtcttttattactttcacctagaaatatcatgtaatataatcatgcactgcttttcatatgaaaagatggccttactgccccaacaatcatttgaatatgagctttgcatgtaatttgcaaaaggtacagggaagtatgttaatccacttttttctgatcctttgggctcaacacctggaaaaagttgacagaagaaagcagtctatctatgagctagagtggaattaagataaaagtcttcatgagacacctagtatccaccaagtcaaatgggatgaatttagtcgcttgaaaattcagaaaatatactattgaaagctttaagttttaaaatcttactgtttgtttttcctttgatataatcaattcttctataatcaaataagttcaattatacagactgtatacagaagtccttgtcttggaattcaaactatgggtgttcaagatttcaccttgaatatctatacctctttgtttctccacaggtcataaaatactcaatatagtagactgcaccagacccaatgggggaaggctgcctatgaaggttgctctaatgatgagtgattttgctggaggagcatcaggctttccaatgactttcagtggtggaaaatttacgggtaatattttgtatgaaagtgataccaagtatcacgcatggcacattgctaaatgctgtaagagtaaatacaaatgtaattgagacatgatccctccccacaagaagcatgcaatcttattgggaaaccagatttgtaagttgcagattaccaactaaggtttctagctcaaaacatgatggagcatgaaggaaatgttgagatctgagagcacctcaggaggagccaagaaagagaatcatctggattcaccatgtagaccgtagagcagaacaggaaaggcctgaagtgggtcatccaggcttaggtgctcttggaatatggttcctaatggggtgtgtgcagcctcaatgtagacacatccccttggcactgtggatgctcatatcagggagcagtgtgcccagaagagagtcctctagttggggacctctagtgcacccagaggagggtcctctggttgggggtcttaggcaggagcccttctgctctgggtccaagagtggggttggggttgacattggggaagtgtgtatcctcaacactagtattgtaagtgctcaatacatgtccacttaataaattaatgtatctgataagtgatccctgtctaacagtgtggcagaaaatgccctgctttgcaatatgaagataacctttgtcccgttctttgctttcttctctaagtctatattcattgcctcccagagtgtgtaaccacatgagaaatagagggaaggttctgtccttaagaagttaaaagtgtgactgggaaggtaaaacatacttattaagggttaactagcatcatgccattctgtgtgatggtgagtttgtgtgtgtgtgcacatgtgcgtgagtacacacatatacatttaaaaaggtcttgaatataccaaaatattatgtctaggtgatgggtagcttgtatattttttctgtatccttgtctgtgtttgtcaaattttatagaaacaataacagtaacagctctctgaccttctaccctgtatgttctgcgtcctgtctaattcctcaagttccttcactgcctgtcactctgatgcttgctatatatcagtccatcctgctttttgtttcttagacccaaagtgtcaagtgcacacctgccctgggtctttgtgtttgctgtttccatttcctggagtgcagctggccctgatttgcatgtgaccagcaacttttcatctatgtctcaactcaaatgtcacctcttcactgaccatcctgtctaatgattccctccatctcatcccactcaccccagccactctctgttccattgccctgttttattttcttcacggtgcatcattctttgcaatgactttatttacttgttcattatttgcttctctcactagaatgaacactccatgagagcagggacctgctttgccttgttcaccactttattcccagtggctagaaccacgtctgacacagagtaggtgcacaataaatattggttacgtgaatgaataagcaaatgaacagcactgtgagaagggcatcatgactccatttacagagaagatacagacatggagaagttaggtagtttgcccaaggctgcccaaccagtaagtggtgggtcaggattttcaacctaactgactccaacgtcatgctcttaatcactgtgtatttgtcagattatgttgaacacacctgttataatctacaaatataatgaagccattttcatgttagtaaagagttaatttcaagaattacaatgcccttaaaatgtgcatgcacaccaactacgattatgcatcctaccctgtgtattcagctagggtccgaatgaattgccatatacaaggagaaagctcagtgcctttggctggcttggtaacattttcctagtaaccaattgaaatttccaagataaaaactccggggaaatcctccactaatgacatggagccttgttctatttctgccttagttacctatcaattttatctcctgaaagagttccaatctgctagaatatgtgtttttctgtgatttttccagcagaggagactccaatctaaatcctgtcatttcagaggaatggaaagcccaattcattaaaacagaaaggaagaagctcctgaactacaaggctcggctggtgaagaacctgcaaccccgaatttattgtccctttgctgggtattttgtggaatctcacccatcagacaagtatggctagacactttgtacatttttacatacaacttaacgtatggtggaatgagcgactttgctgtgaaagcagtgtgacatgagaaggaaagtgattagtaggtgtctggaactttttaacaagctgctggagaacccagagcatgaataaaagttacacttggcagccaggaactctttcagaagataaaataacagatagatattctccgaaaggatcccaggaaagaggatggcaactgccatttattatgtgaagtgaactggggacttttaactaagccatctaagttaatctcccaatagcactatgcgtaggaagggggtattgttccttttttgcagataaggaatctgaaactcagaaaggtcaagggacgtgcccaaagtcaccctgttggaaacatgagttgagaatggaaccctggtatgcttagttctaaagctcttttctctataccatactgcattccagaatagaattatgtctttcttctcatgttttaggtatctaatgtgatttttcttgcagcaatataacttctgcaaatactatgaatcatcaccaatgtatgaaattgttgaaagaaataaaagaccatgaatttgatcttgtcccctttgccaatgctcagttaagtcaagaaaacctacatgattaatttcaagattttcttgaaacaaaagaattgcttgccaaatatgcaggaatcgaagataaaatctggcagggtagtttgttttttaatctgatatcacagtgcctatggaaaaactcattttgaatctcatcctaagtctgactccagcgtcatgctcttaatcactgtgtattgtcagattatgttgaacacaccttgtatttgaacacaatgaaaggaaaagcttaattgtgacttagttacacgggaagaaatattttattaggttcctagagctgttgtaacaaaggaacataaactgggtcatgtaacaaaaatttgttacaacagccctagaaacctattacaatttttgttaacaaacgtttgttaagttctaggggtcagaagtttgaaataaggtgtgggctgagccatggtccgtttaaagccgctggggaaggattggttcccggccctctcccagcctctggttgcctcagacactccttggcttgtagatgaccatctttactctgtctcttcacatggcattttccctgtgtgcctatctgtgtccaaattttcctttttttataaagacatcagtcagattgttttagagcccacctacatgacctcattttcacttgattacctccataaggaccctgtctccaaataaggtcacattctgaggtactaggacttaggactttaacatttcatttttgaggggaaaacaacccatcacacgtatttatattaaaatggaaacttttcatggcaccaattaataacagttttatacatttttaaaaaaccaatatgcagattttatttttaattgacagcattaaaattgactgcaaagttgagtaaaatttgaagaatgtttcattagtattgataatttatagttgagttttgatttatgtaatacccctttgaattcaatggtaatattaatgagttgacacaaaagttagtgaatttactaaacttggacaggcatagttttgaaactgttatgcttttgcttcaaagccaaatcagttcttctaaaaaaaaatatgaaccagttgtgtcaatgtggatttgagtgctacatgaaagtacatttttagtacttgcttctttttattgggaaactttttgggtatgtgtggaacaacttgagcatgagaagctactttttgaactattcattttataagatctatagatcaagtctttctgatgaaaatgtaggatctaaattgagatgtactctgtttaaaatatacattggattccaaagacttgataatgcagaaaagaatgcacaatatctcaataatttttaaaaattgatttcatattaacatatttggattgagttaagtaaaatctattaattttacctgttactgtgtacttttttaatgttgctactagaaaatttaaaattacacatgcttgaattgtatttctgttgaacagagtttaataatttttggcatcatagaccttttaatagagtaaaatcttagctgtatagaacttctgggaacttgggcattctaaatagtgaaatcatgctaggtagcaaaattttctggataggtatagtttatctctctagatgtgaaaattttatgatttaggtataattgtcttctcagaaagagtattagaacataattgatattttcttgatatcatggattcatcatttcaaagttttagaatgtaatgtaacagcttgatgttcctacagttcactggaggatgttataacaggatgtgttctagtccattgagctgtttgcccctgcactaaacggccccaggcagtaaagcattatatctgctcgttacagttttgctaagttagtgatcattcttcactgctgtaacaaatctttaccagcagtctcaatccttctctttgatttgctgcttctagccacctaagtaattaagtcaaaaattaacttactttcactttttgtacatatgcttatgagagaggccctgagcaactctcctggtgaaggactgctagaagcctcactcatagatgacactccaaggaaaaagaatcattttctcaaatcaaagcaatttcggttcgaataatacgaagagaatccttgttgcagtcttttctctcgctaacctctcaccactttgccccacaagcatatgcagtttccagaacatgcacagcagtacagggaaatcgaagccctggcttttcaaccagaagatgaaggggatacctgggaagcagaaaatcatggagagatttcagataggaggaggcttaggaaagtgagcccataaaattatggataaactcctgggttaactccaaagctgcactgtgtgtgtggacctgaccctaaaaaggatatcagagtacatatgctaaaaactacaaaacagatgaaagaaatcaaagactctaattagataaatggaacagcataccatattcatgaattggatgttcaatatagttcatattttaattatccccaaatttatagattcagtacaatgcccatcaaaatcccagcaggatattttgtagatctagataatgtctaaaatttataggaaaggcaaaggaattagactaatcaaaataattctgtaatagaagaataaaattagaggaacatattctctaattttaagattagctataaagctgcagtaatcaagatagtgtgatactggtgaaggaatagacacagacatcaatggaacagaatagagaatccagaaatagatccacacaaatatggccaattgatttttggcaaagatgcaatttggggaaatgtgaatgaaaaaaaggcttttttttggggggtggggaaggattctcactgtgtcgcccagcctggagtgtggtggcgtgatctcggctcactgcagcctctgcctccacctcccgggttcaagtgattctcctgcctcagcctcctgagtagctgggactacaggcacacaccaccacgcccagctaattttttgcattttcagtagagatggggtttcaccatgctagtcaggatggtctcaatctcctgacctcacaatccacctgccttggcctcccaaagtgctgggattacaggcatgagctgcaagccactgtgcccggcccggaaaaaggcaatttaatggagaaagggtagtcttttcaacaaatgttactggagaaattgcacacccatacacacacacaaaaaaaaacctacctcgatctgaaccaaaaaaaaaacctacctcgatctgaaccttatgtcacatgcaaaaagtaagtaaaaatggattatagatataaatgttaatataaaactataaaatttttaaaagaaaatataggggaaatattcctgaccatgggttagggaaagacttcttagatgttgcatcaaaagcatgatctattttaaaaattaatatattattctttatcaaaatttaaaatgattgctctataaataggaaactattaagaggatgaaaaggcaaactatagactctgagaacattttgcaaatagcatacctgacaaagaatttgtatccagaacatataatgaactctcaaaactcagcaataagactacgatttaaaaataattttaaaaatcaatagtaagaagatttaaaaattggcaaaatatttgaacagatacatcaccaaagaagatatatggatgtcaaataagcatatgcaaagatgctgaatagcattagccattaggaaaatgaaaattaacaccacaatggcataactattagaattaatggcactttggaaaattgacaataccaacttatgtcaaaaatacagaccaagaggagccctcacactttgctcttaaggatgccaaatggtgcagtccttctggaaaacgcttttgcagtgtctttgaagctaaccttactgtatgatccaacagttccactcctgagtatctgccctaattaaattaaaactttattcacacaaaaaatctatatgcaaatattaatagtagctctattcataatcaccaaatcaacccaaatagccttcaacaggtgaatggataaacaagctctggtatagtcatacaacagactactactcaagaataagaactgctgcatacaacagtgtggatgaatctcaaaggcactgtgttgagtgacagaagccagtctcaaaaggttacatactaaaagattctatgtatatgatattctggaaaaggcaaagttatagggatagagagtagatcagcgattgtgaggaggtaggggttaaagaaggattttactacaaaggtgcaatgcaaggaagttttgggggtgatgaactgtcctgtatcccgattgtggtggcagttacatgaatctatatttgtgttaagatctatagatctgtactccctcaaaaagtaaaaaaaaaaaaaaaaaaaaaaaaaaaggatctcagtaaatttgaaaaattaaagatcaaaaaaggcaaacatggtgattcttaaagagcaccttaagccttggtagttaaggcaagcatattgggttttttgtttgtttgtttgtggggtttttgtttttttgttttggttttggtagaaacagagtcgagctctgtcaacccaggctggagcgcaatggctgaatctcagctcactgcatcctctgcctcccaggttcaagggattctcctgcctcagcctcctgaatatctgggactacaggcatgcaccaccatgcccagctaatttttttaaattttttgtatttttagtagagacagggtttcatcatgttggccagactggtctccaattcctgacctcaaatgatcctcccaccttgacctcccaaagtgttgggattacaggcgtgagccactgagcccagcaagcatatttgtttaaatcatatttgtgatacaatcaagttatattacatgcacattttatggacttcataatcccttgctaaagcaatacatataataaatctatccattttgtgttatatggagtacaattttattttaaatgctaaaggaaagtttatagatgtttaaactttgctaagatttccttgattgtatataaaatttatttgatcctgagcttatgcagtgactcatcccctagctataacgttttcatgagcaatcatctgcttcacaaaaacatttattttatcatacagttactgatattttgtgaacaaagggcagggactgtttatgtgcaggcaggaaatgcatgtgtcattttaccaagaaagtacacttacctgtatttgtctgaatttattggataataagtcggtcctcgaggcgagtttttgtgacagtaatcttgttaggactgcccatgacttctcatcaactggaagcagcagtacagtagaaggagcggtgtacatgggattgtggttttggttctaccaccatctatctgacttctctgcacttcatttgtctcattgttaaaaacctgtcatcattttgacatgctacgttctcttgcaacgtagctacatgtgtataattgcttaatgtggtctcttgctgatgtgtttctttttaaacttcttgttgacattatttagctctcttgtatcttccaaattttttcagaaaagattggtctaaggttaaaacataatttcttttgatcattgctctttgttacttgtaaattcatttgtcattcactgagcagcactgtgctaagtactggagaactagagataaaatgattgtctgttctcagagtgatggtctattagaagagaagaacaattggaatacagaatgatcaatgcaggcaaggggatacagacgcaggagaggagacgaacactggatgagtctatgaatgctgcattttaaagaaggagtaggaactgaccagcaaagataaaaagatgctgggatgagaaattgcagttcagaacaggagacaggggttgtatgagcactttaggacatgctacgtgatttggattttttcctggaaggatagggagcctgatagtcgggtgaggaacagggatgtaatcagatgtgaactggaggggttagtttgtatgcctgtgtgatggcaaagggaaaggaagaccagtttggaaactattgcaataacccaggaaggaataatgaatggcagtggggagtgagaatgcagattcaagaaatattaagtaggttgagttgcaaggatgtggagaagaattggaggtggtgggtacttgaccacttaatgtgatgctgtcatttaaagcaattaaaagctgtactgttgcatgtaagcagttggcaaatactttcacttcccacaataccccatctagatactgatcttatttttattttatagagagacaaagacacatcaagaagttacagaactttgtgaccaccacacattatgttttaggaagagtaatgaatagtaacatagttggaggcagggaaacctgttagtgaaccatgtagagactaaaggctggaagaagatgagacaaggtggtgactgtaacagtgggaggatattaatgtgtgtaaaaagagaaaagctactgacgcctttggtgcagtgacagcgttctcacctgtgtctacaaaattgattccaagatcataaatgtgtcaccttggtgctatagaaatacaaatgattatgtactttttacttatctcactaaaaatatctatcacgtctgtgtaaccaatttgtagctcaagaaagtaaaattccctttaacagaaatgtctgtctataaaacccatgttaggtgaatcacagtgacaaatctcgttctctggatctttctctttctgctccaacacaaccacaatcaccttcttgtatgacattgaaattgaagagttaaggcttttcaagaaagattgtggtatggaattagatttgggagacaccacgcttctatcaatgccacagttagaaattagatctcagccagacacagtggctcatgcctgtaatcccagcactttgggaggcagaggcgggcagatcacctgaggtcaggagttcaagaccagcctggccaacatggcgaaaccccatctctactaaaaatacaaaaattagctgggcatggtggtgggcacctgtaatcctgctacttgagaggctgaggcagggagaactgattgaacccgggaggtggaggttgcagtgagccaagttgtgccattgcactccagcctgggcaacagagcaagactctgtctcgaaagaaagaaattagatctcagagcccaggagtagtcaagaccagcctcagcaacaaagtgagaccccatctctacaaaatgtcaaaaaattagtctggcatagtggtgcatgcctgtagtcccaactacttgggaggctgaggcaggagaattgcttgagcccaggaggttgaaccttcagtgagccatgttcatgccactgtactctacctggatgaaagagtgagaccccgtttcaaaaagaaagaaagaaaaaaagaaattggatctcaagatgggttgcaactgaggatatgtgtgtgtaacaagtagattttttttttttttttttgagacacagttttgctcttgttgcccaggctggagtgcaatggcatgatctcggctcactgcaacctccgcctgctgagttcaagcgattctcctgcctcagccccccgagtagctgggattacaggcacccgccaccatgaccggctaatttttgtatttttagtagagacaggagaggggatttcaccacattggccaagctggtctcaaactcctgatctcaggtgatccgcccgcctcggcctcccaaagtgctgggattacaggcatgagccaccacacccagccaacaagtagatttttaatggttttgaatgtaaaagcttttcagattttactcccaaagttttgtggcaactgtgagggctgaggcttcactggctgcacagcctgtgtcagacagctgggtggagagctggggctgggctgactgctaatggtatggcctcaagcaagtcatgtgtcttctctaaggcttagtttctctctctctaaaatgagcatcataatagtgcctcatggggcattgtgaaggtaatcaattagttcatattaaacacttagtataatgcctgccaaataatagttaatccatatattaacattaaacacaggagtgtgcaattcccacctattttcagtagtcagtcttgctacatctaacttcaattccaatcaccatgcaattatacttaaaaacaaagtataagtacaaccttctttgactgacacttcttctctaattagggacattagcccaaatatagtctttatttttccatggaataagtggaggaagattggaaagtgaaaatgtggagaaaataaaacaaaaatctgtactcatcagaccatgcacctgagaataaactttcttacatgggaatgcttttatttctcaggtacatcaaggaaacaaacaccaaaaatgacccaaatgaactcaacaatcttatcaagaaaaactctgatgtgataacatggacccctcgaccgggagccacccttgatctgggaagaatgctgaaggatcgaacagacaggtttggcttaaatatttttagaggataaaaatgttttataattttttttcaatactattagaaaataaatggctcacctctggcctcttgacaggttcctattttgtttgttatacagtaaaatccacacatcactttttattttatttttttgagatggagtctcactctgttgcctaggctggagtgcagtggagcgatcttggctcactgcaacctccacctcccaggttcaagcgattctcctgcctcagcctcctgacgaactgggattacaggcacatgccaccatgcccggctaatttttgtatttttagtagagacggggtttcaccatgttggttaggctggtcttgaactcctgacctcatgatctgcccacctccacctcccaaaggactgagattacaggcgtgagccactgcgcctggcctacctcactttttaaaaatggaagtcttcccatttaaataaaatgaactatccaataagtatgtcacaaatctaggggaaaaaaagactgaattttttcctaatcttttcatcctatataacagtgactcaaatgttttcatcatctcagaaccttactagcgagtaaacagtgaagaatcttttattaaggtccattgatacagctcaaaaataaattattttatgaaagtaaaaagcaataagaaaattagttttcatatcagtgcaaatattacccaatttcccattccacagatagtacatttgaacaagtaacaataacacactggaaatgcaatccaagaaaagttaacatgatgccacaaagctatatttttgaatactactctaagccaaatgaaaccatcatgggctatttggaaatggactaacattttggagagtggtacatgcaattaccaaaagctcaccctctcccagccttacctctgcaaagtcagtatgaatgataaatcagctcattctgtcttttgctaacttcccatattaaacgagttatcaaatctggtcaattctccttcataaagcactcacaaatccatcactcgtctccagcctcttctgccctggccttaattctgcctctcaaaatttctcacttagactcctgcagtgccccccaacttgtatctgtgcctcccccacaacttcccttgatccatctttcatgccagtgtcttcaatctgctggtcacaatccattggcaagtcacaaaattaatgccattgctcacagccaatgttttaaacatgaaatagaatagaataaaatggaataggatagaaaatacctgagtacattgcatgtaacaagggtattatttcatgaaactttcgtttcataggtacccttggtagggggactccagggtcctaatgtaaaatgtagtctttactgggatgataggcaaaatgtttgaaagcccctgctcttcattgctgacaaagtaacctttctaaaatgcaaacattcttgtttaaaattctgtaggatatccttagtgcctccaggataaaagtgtttttaattttattttccaggtctaaaggtttttaattattccagttcttagcaaggtattcaagagccttcgtcattttacatttgcctaactctccaaaaatcttctctttcgattgccccagcagttttcaagctttaatgaacataggaataattgaagagactcacataaatccagatccctggactcccttcccccacagatcctgattcagtagatctgaggtagagcccaggaatctgcatttgtattcttgtgcctcaccaaagcattctgggtgactagaaagtcaacaccgttgggtcttagagctaagacgaagtatagaggacacacagagaccaagtgctctaactgccttgcaaggggaagaggaaaaaattgtgaccaaggaaagcttaatctggatctttggcatttagagatgaggaggatgtcacgagtaagtagagaggagaaagagattctagtcagaaacaatggcatgtgctggagaaggcaagtgtataatgggtttggtgaatgcggatactttgaatgagggcataaatatatgtgattcattcagaaatgatttattgaactccttctgtgtgcaagtcatcatcccagatacagaggatacagctgtgaagaggcttttgccctcatgaagccatctgtcttcctaagtagagggctggtgagtgaaagcagaggaaaagggtgagataggcggcagccaggctcggagaaaggccccagaagccagtgcagggaatttgtcctgtgagtgaggggagctgcagaaagttataaagcaaagaagggacattactgagtttttatttagaaaaaccatttcagctttgcagagaatggactggggaacaggtagaaccactggagtaagggagagtggttgggagggtgtggctttctatagaaagagattagtgaagctctacactgaggcaaggcaaggagttgcagaagaagatttgagatacatttagaaggaagaagctttaggatttggtaaattttttttttttttttttttttttttttttacagaaaccagtacatctgtagctttgggcatataaaagtatagttttgagaagaaggtcagctactgccacgtctttatgagatgggcacctatttccctccttatattttctttatccagatcacatcctattccattcttgggatttaaaattccatgttttatgcaaggatacatcttcacatgggatggacagaattctaggattgtcagagaactctaccacattactggctgggtttaaggataaaaactggcatctgtctattggctgtgctttgattaggacagcaagagcaccatatattagagacacaaagttctgggaatttcttaaagataggctaaagtcatccatatatccaacaaatatttattgagcacctcctatgggttcagtcatggttgctactttcaccaaacttatattctaattggggtggggaggcacgaatgtgcaggcatccacaaaatcatggccagattataagcaacatttctgtaatttacttgtttgaacaaagaggcccaaattagtggttttcacacgtttttttctagacatagacttctttctttgaatgaaatctgacttagaaacctatcacactagacaataggagctgctctgatttaggcaatggtgggaccactgaggcacttttgtgggacgccttgtgaattatctgaggggtctcaaagctgctagtctggttgacttttgctacttaagtactaacttttgccttcattacttgttactttctttcactgttctcacacctttgtgtctttaagcaagggcatcatagagcctccagaggggacaaaaatttacaaggattcctgggattttgaaccttatttggaaatcttgaatgctgctctaggagatgaaatatttcttcactcatcctggataaaagaatacttcacttgggctggatttaaagattacaaccttgtggtcagggtatgctattgtttgtctttgctttcttgtataatggaaatacatgaacacccctttgttttccaataagcatttattaagtcctatcaactgcctaacagagaacagatttcacaattgatcagcaatctcttgttgaatatttagagaatgtactgaagtccctaagtttttcttttggaacatcttttatctgctatcaccacgtgttttttgttgtttgtgtttgtgagtgtttttggcatggcaggaacagctatttaaactgtggggctagaaggtaggatccacccaaagaggtaatcgcccggagcaaggtgaggtagaagcaggtaacccttgtctgcagctatgctgaggctgaattgcacaaattaagaattaggcctaggtctgcagcttaatctagccctaacacatacatacagagccacaagctaagaaagagttcatgttgtaacctagtcaccaaaactggacagatctccaaaagcaaactaaatactagcagacagagggtgcaagacaaagaggaggtctgaaatgggacaggagtaactgcaaagtcagtgagtaaccagctacctgtggcttatatgagatgcctgaagttgtacaggggagcaaagtttagggatgtcatcaggaaatggacaacactcacactcttaagacacaagtattcattaccctcagggtaagaagtactcccaagtttatctttcaattcctgaacattaatgccagataatacttgctattctcaaaagcaatgatccccagaaacctagctggggcccatggccagtctgtgacaaagtttttgctggcaaatagtgaaataagtaagagagcaggtatgtatatcaactctcttttcttgggatgaattgttattattccatgactaagtcctttctatttgggggtattaaaacattatttcttcaatgaaataaaagggtagcagaggcaaggtttttttcagtcctcacttagccaaataaatggttgatatctatattagttcccagataatttctagaaaattgtctttgaaatctaatgacctaggaagcattggtaaatggtattttcattaggacaattggtatgaaaaagagaaaaacttttgacagttttttataaaacattttcagtgaaaccatttctatttagctgctatatgacaatgagaaacatctcacatttatttcctcacctgcaaatttatggtgggatttgatgtctcattactaatagtacttcagatagcgataaccagctgtatacatttgatgttagtgacatgaagcggttttgctaatatagactaggatttgaatgttgcagttcaggtgagagaagagactcttaatttcccattcattcctatcatctatcatctaagagcatttgagtcttacacattcttagaatttttaaagaccttgaccacttgattgatattcttctctttaccatgttgtcatttgcacagatgattgagacagatgaggacttcaatccttttcctggaggatatgactatttggttgactttttagatttatccttcccaaaagaaagaccacaacgagaacatccctatgaggaagtaagcagcaacactggtggaagtctgcttttcttccttctttctttctttccttccttcctcccttccttcctttcctcctaaataaacttttaattttagaataactttagatttacagaaaagttacaaggatattaattataattaatacaatattaattataattaatataattataattaatacaatattaattataattaatataataattaatacaaagtattattaacaactcactttactatggtacatttgtcacaactaacaaaccaatattaaaacattgttattgatcaaagttcacacttatttctttatgagccattcccaaagattgacttctctgtctgctcacttccaaacacctgctcaacctaagctgttattagacctgtgagcattgatctctaccttcattttcctgtgcccctcccaatgggtgtctctggaaagggagttagatcaacatgaagcaacacatattttattgaattcaagttctgaacaaatccctcgccagtggcagcattatgtaaagatccatgacattggagacagtgtcaagatggggactgatgcccctttctgctgatcatgattcctgattaggaggctttgagcagttatttaagctgtctgagctttaggggtttttgtttttgtttgcttgcacagggcttgctccccccttgccagtttgtcgtgatagttaaatgacataatatatgtgagcatgcattgtaatttaaaattgtctatgaatgtaagaatcattagttatgaggatatacggtctgcccttaaacttattgtatgtgccatttaaatgtgtgatgtcctaaatgtagaggtttaaatataccttcacctaatagatgtaataaatgtgctcttgaactacattttaataaattgactagtacttgctattgaagaaatcctatatggaaacttcagtaaaagtaataatctgctacctgatttataggtaataataataaaaaaactggcactgggcacggtggctcacacctgtaatcccagcactttgggaggccaaggcaggtggatcccctgaggtcgggagtttgagaccagcctggccaacatggtgagaccccatctctactaaaaatacaaaaattagctgggcgttgttgtgggcacctgtagtcccagctacttgggaggctgaggcaggagaatcgcttgaacccaggagacggcagtttcagtgagccgagatcatgccattgcactccaacctgggcaacagagcaaaactcggtctcaaaaaacaaacaaaaaaactggatttttacaggtaagaaaatcctgtgtgaggcaccgtatagatgataaataggcttacatctttttagacaaaataaatctttacatttattgctttatatatcaaatacttaccaagcttgctttatgccaagcacagtgttaaacactttggaaatgttaagacatttaatccaacaacaaccctgtgaacagatactactatctgcccccattttgtgggggaagaaactgggattataagagttagaataacttgcccatggttatacagctaatgaatggtgatgcggggctttaactcaagcagtctagctcaaagtctatgctcttagccactgtgtagcctttcaaatctgaatttacaaaacctataaattgaggtttcttagcctcaagagattcacctttgaaaatttttaaataacttcatttaaaatatttaatttggaaaaaaaatcactttttcacagctttccataatgcatctgctggataaagcaagcagcagctctgttgcatatttaaatacaccatggggcaaaatcatgatgcctgctctgcacatggtactgttagactgtggcttgagggcttttatctcccaggattttagggagagttctatatgctgaggtttggttaaagaggttatgcctatgtgtggaagagctccttttcttgctacccggagacttctcatattgcctccctcctgccacctttttggaggtattaattgcctttcaaactcatcatttctatcacactaactctccattcttaaatgcatggctcctgtagctctccatcctcctgctccgacctggaagggctcctctctagctctgctgcaaatctgctacctttcactgcctccagaccccacccatgcctttcccttccttgcttcacttctatgtgggactttctgcttaactgtctcctgcctcatggtgtgtaagtaagtttcagcatgtaattctgggtgactaatcattttccatagacaccggaaggcattgctcctttggcttccagttatagacaaggttgctctaaagaaaacttatgctagcttgatcctcctttctttgtgggtgacttttaagaattacaggattagtccatatttactgataaaaagacttttttcagctgatttggggctcttatgtataggtgtaggatctgtcatccagtaggctctacttacagagggctcgcacactggtgcaaggcacatctcataaactggtgaagctggggcagactgcatcaagtagaatgcgggatgagaagggggcaggcctgctgagctccggctgatctgaaatttccagagaacttggaaatctggattttcatgtgaaatacccaaagttataaatgtagaaagctgagtcaatgttcttaaagagttatagactacatgaaatgagagctaggctgtatttggccaaaggatcatcagtatgctttaagctgtgaaggtgaggagagaagccagctaggggacccccgagtgcaaaaatgtggaggctcttgctttcagcatcacaaacacactacctgcccttgttctccccctaccccaaaattgattctatgtattgagagaactgtagaaatatatttgacctgggagccatatataggggtagagaaggggccagctatctcatggacataacttttgtgcttgccctcctgtcatccgcagtacctacttctcttccctccacatctgaacacccctccatgtactgtctgggattgtacagcctctgccctgcatcttcggtttccacttgtctgcatgctttctagattcacgtaattagttgaattctcctgtcaatgaatcacttccttttcttttcaatgtggcagtttattcctgtataattgctttgcaacattttagttggatctggaaatgcagaggagataggttatgcacgcaatttgtccgtcattgtgaaccaatagtcttctccttagcccagtgacagtacctccttgttttcctgaatattcttttgcattcttttggagttcctctttccccagccactgcttaagtctcttgtttccttccaggactctgtgttcattccactgttcttcccaagtctcttcctgggtaaactcacctgctaacatcacttctctgttaatgactccaaaaataatccatatgtccagcccagagcgctctctggctacctccagtgctgtcaagctttgggttcttaatagtcaactgcctgctagatataattgtctgaatttctgaatgcttaatacataattttcaacttgttcaaagttcaattcctcatcttccttctttaaaatgttctttttcctttttctatctgatcgttggtaatatcattccccaagtcagtcaagctagaaacaaatgagtaatctttggttcttcccttttccttacatccccaaatctaatcagtcatctagacctttccattttacaccccaaatatttcttaaatctacttccaattctcctgtgtgcttctctcccagctaaaaggccaaaaaaggccatttaccctgcattgggaggaaccaggtcctggtactgcatcttagccaggccgaccttaacctgaccaaattgtagaatcatgtttctaaacctctattagcaaaactctgccctatgtttgtaacctcagttcacgatggatataattgttttatacaaatggtgcaaaaaagagaaatagatctaaaaatgccaaacttccaatcattctgtgtcatttaatagcctgtcacttatggaaagtttgcctctactgatattagcatgatatttaccgggagaaaatttgttgcagacactgaaagggctcctctaaactctaacattggtgccgatggattgttaaaactatgtgcaaccaaggataacttctctttattttctttatataagttatctcatttttttctctcaacagtctcataatagagaaacggaggcttagcaagcttaaggtcacataattagtaagtgcagggctgagactcaagaccatctctgcttgtctcctaatcctgtgctgctttggctcttcaacagtttaaaagttgggattctttaaggataaggatcttgaccacttgatttaaagtaatcctgttctatgacaggccagaaactatagactgttgtgagcttccaggctctgctttgcctctgaatgttcaggtggagacttgaacactcggcttttagaatgacgataacagcaaagatttcttgagtgcttactatgtgccaggctttaagtattttatatacatcctcacaacaatcctatgaggcatgttctattattgtcttcattttatagatgagaaagccaaggcacagaacggtgaccaagatcacacagctagagtctggatttgaacccatgaatctgcagtttgtgctctcagtcagatgctccccctgctcttaatccatttcctgttttccttctttcgagtcctgctgcacttagcatctttccttttctcctcagcctgtgatatctgctcccagagactcttctccttggctctccgtgcctctgccatcatgggcagctgctcctcccagggacaggagggatccatactctgcttcctgggttgcccctgctagtggttccatgtctatttcagatccatagccgggtggatgtcatcagacacgtggtgaagaatggtctactctgggatgagttgtatataggattccaaacacggctccagcgggatcctgacatataccatcacctgtaagtctggaagcacctggcgcccccaggccattgctgaggatgctgtggatatgcataagcagtcagtgactgccgaagcccccagattctgactaatgtgtgagattccaccattagagcttcattcctttgttagtttgttaaaaagcaaatctggttaggaaggtataacattaaagagtcatttatacattcatgtgaatgtgttattgcacccttctggaagtgggttttggtataagaaagagaaatacattataagagggaaagggtatgtttgccaagacaagaatgagtatttgtgtggcaaagacatggtcattgaattagtgaattcctgcatcacatttttgtctgtgctcacctctgagcaagaatttggtgggctagttggtttaagggaatggcccactgagtttctgtctgcctgcacttcaaaactgtttaagtctttaggatcatatctagaatatttgcactgaaattcagaaagggcaatttgccatttttatatttgcaaaataatcaccaaaggaaagagtactttttctcattaccacagatcctctgaaaaaaaatgcagaaatttaattttaaaattctaattatttaaaatgtataagcaaaagtttgtactctgagcttgcaagcagaggcatttattaaaatttcttttttacttatttccttttgaatgtttttaaatgatatgaaaaagcttaagaatgtggagctatgtaaaataaaaaggaagtaaccccaccaagcacctctcaggaaaccctgtttcctgcccttccctccacccactcttatggtaagctttgataatagctcagtgtgtatcctcccaggcctgtttctggacatagcaacatttctctacatatatttgttttcaataagatgtcccacatagttggtagtgagggagtgttattgttgccgttgtttttatttttttttaattttggcaaagcacacaccacctttgggatgttgctattgtttttaaatgaaatcctagtacagatattctgcaacttgcattttttactcatcaatatattttagatagccttccacattgggacatccaggtcaacctcaaatcttttaacagctgtaagacattccaagtttttttcattttcaacggatcatatacgtaactcttgttctagaaagaaaggaatctggcaacttttgaggggatcttggggattttttttttcttaagaaaataattccatcttagaaatcgctaaactctatcttgttctattgtgttttggtaacaagggtcacaaatataagatgtcatcataaatattgggaagcagtcacagtccactttatcttgttgctctgaaaatgggatttgtgaatttactaaacattcttctggttataaaaataatacatatccactgtcaaaaatttgaaaaaatatttttaaatgaaaaaactacaaataatcccactacccagaaataataattgatattttggtgtctagctaatctttctttttttgcttccaagcacatataccatacatacttttctacctgtgtgtttatcaacgcgattttccacagtattgtattttcctacatcatttttaatgcctgcttacctgataccacatacctatattagcactttatttaacctctttgacctgtaagtcatttctaacttttcactatttgaaacaatggcaaataatcatgtggatgtgtcttgcacacattcatagtgacttctgtaagttaaattcctaggagcggggctgctggattctatgaatacagcgtctaggcttttagtgccctctgccaaatcgttcttcgggaagccagttcacctttccaaaaataatgtatgagagaatacatttacctgtaccttcactaatactagattctgttgcttttgtgtacaagatatagatctagattttcacatataaggattccttaaagcaaggaacatcatagtacaataaaaataagacaaaatctcgttcaaggagctgtctgtattcaacaccctgaaagttctgagctacatcaacagctggaacagtacagaaacactatctctcagggaggacagagtaccaggtaccaaatagatcctggcaaaggaacaggcatggaagtttccagagcacattcccatgctttatctctcttacaggttttggaatcattttcaaataaaactccccctcacaccacccaactggaagtcattcctgatgtgctgtgagcagaatgggcctgcgattttgcaagtaaggaatatcctgtaggtttgggagctgtcctaccgtgcatcccgtgacactctctttgacacctaaattaagcagacgcgttgcctgacagaaacccgacttttgcgggactgagaacagctaacattacaagaccattcaagtgttttaaaaagtaaataggctaggcgtggtggctcacgcctgtaatcccagcacttcaggaggccgaggctggtggatcacctgaggtcagaagtttgagacctgcctggccaacatggtgaaaccacgtctctactaaaaatacaaaaattagccaggcatggtggtgcttgcctataatcacagctactcaagaggctgaggcaggagaattgcttgaacaagggaggcagaggttgtagtgagccgagattatgccattgcactccagcctgggagacgagcaaaagtccatctccccacccccaccatcagaaaaaaaagtaaatcagtagtgcatccagtccagagtccatagaacctttggcctggttgaggtaaacatacagccaataagtaaacaaaaccaaaatcgtccaggttgtgagtgtttaaaacataatcctgagtacacgagggaaagcagcaacaaaaactgaagagagacaaactaaaaaccgagggtgagatggaaagcagcagctcctcatttccaatagacctctctcctcttttggactaatgacgatgaacttgcctggcacaaatcagatttgacattcctttcctgcagcctgagatatgattttattaagtgaattataaaacctgtctcagctgggctcagtggctcatgcctgtaatcccagcacttgggaggctgaggtgggcagatcacttgaggtcaggagtttgagaccagcctggccaacatggtgaaaccccatctctactaaaaatacaaaaattagccaggtatggtggtgggtgcctgtagtccaaggtacttgggaagctgaggcatgagaatcgcttgagccagggagacggaggttgcagtgagccaagactgtgccactgcactccagcctgggccacagagggaaactcttgtctaaaaaaaaaaactgtctcctcatgcttctgattgaagggaccacataatatgactgcaaagacagtaaactccttgactcatgcatttatttattccacaaacaggtatcccatcccattgtgttataataatctattaattgtttttcccagtagatactgagattcttaaaaataggaactgtcacctgggtagccctagtgcctagcacagtgctgagcacacgtatggttttattcctaatatgaattcaaggaaggaaggtacaagtgaatttctctttcccattgtcagcatgagtcgcctcttaaaataggcttcaatgtctttagcagtaaaattaaggtttgaattagaatatcttttacatactttccagttgtaaagttacttgttccatattctaatctagcataaagcactgggctagaacttctaagttataattataagctagaagggatgctaaggaaatccacatgcaactttattacaaggtagactctcatgagcactgtatttgttgtacaaactgattgtcgggaatactgaggaaagaaggattgcatgtgaggttttgagatgaccaggaagaacgttgtagagagatagcatttgaggagtaaggggtaggggattggcttaaagattgggaaaagttttaaacaagctaaaacagagagagaggaagaatatcccagacagagagagtgggtgaggttaaaaggtggaaaaatacaaggtgaattcatgcaatggcaagtcttcctcatatggcaccgaagtaagggaaaccaggaaaggggcaggagtgggaactgggagaataaggagagttaagagggctcaatgcagatgctgagcaggtttagccattgtgaaaaagcaacaggaataaaagctaaggaggcagcagctagagcaataagtccaaggtcttagagatagagcagttttgaaggaagacaaattaaaggtgtttctgtataagtgggtgaatgaagcagagcagagatgaaggcaatagaaattaagagatcactgtgtgcatttggacattgctgtctcaaggagacttggagtctgaccttttgagttaaaactccagctctgtcacctaccatatgaccttggacaaattattggatctctttgtgttccagatttccatctgtaaaatgaatgtaatagcacttacctcacagggttatgtcatagtataaggcatgtctagaaaagtgacatgccatggtaagtgaacaatagatgttgaccatatcagccccatgaaataaacaggaataccatgtggcccacagtcagttggtaaatccttaagacttgggaggagggtcatattccagttcacattccagttttagattctcgcttatcttaaagcattatagaccttgaactaaataagaataaaaatttgccccagtgcagtaagaaaatgaaaaggcattgaaatgagattcatactgttgttcattaataatatcttcatttcacaggaatgcaaaaccacatgaaaatttcaagaattcactgatctgatgcaaaataaaaatttatcattacatcttgaacccaggaagcttacagcaaagagactatgctttatgacgtcagcaatagataattccacgttgcctttgtgatttgtatatatagcttacatttgtggatcactacatagccagattcaaaaatattttacttgttccatccacagttctctacagaaagaaccaatgaacccaataggaacaaattctctgtggaaaacaaagcatagctgtagtagatacgaatccaatcacagaggaaacaggaagagaaaaacatccaagactacagtgaaaactggaaatggtctgttttcgtgatattcgtatgattaagatgcaaattttttcttaggaaaatgtgattgttaactagcattctgttttacatgttgacatttctaacacacacaccactgatttgaacttcaaaatttattttctgattatatatgctaggtctgattctgaagatacaagaattcaatggtggaatttgtctcctgaaatttctagattcataattagaagtgtttattaccaacttctcacttagattaacatcaatgatgtttgattattctggttaaccgctcacatgcataacaataatgctagaaattcaggaattataattttgtgatttatactgtgtggtaaattattcagttctcactgcaaataaatataatgtatatcaatgtaatgtaggtcagaatgtctatggtgagcaaataaaagattattttaaaatatgaatttttctcatactaagtctatctttattctcctgctatctttccagttctctccttctgatatcctgataccaccagttctttgacatcaccaggaccaccagttcactgacctgatatcagctcctatgtcctcacttccctttgcactcctctcgcatataccccacatttcctgctgtctccccatctccagtatctcatgtctcacttccattacttaaataaccatgaaatcatctttctacttggctctcacatccactctgtcaacaaattgtcacctccatcttcagaatatacccagggtctgaccaatctctaccacttccactgctaccaagatcagaagaggaaggaaactcaaaggtacgataatcttggcattagggactgattttcctccacagacacccgccaattccagaaaaggccaagaaactgaatgcctcaaaatttgctcaaagccatttactgggagatgtctcgtggtcgacacattcctagtatgaagtcatcctaaagagtgacagggaagctgctagctcttgtgtgctgccaccacacctggccccctaacttgttttttgaagcaaaaatattgacaccaacacgtgacaagaccatgtggggaaacaaaaatttcaggacaatttcagaaatgatcatagatgcaaaattccaaagtatcaacaaatccaacctagcaatttataaaaaggatgatttattacaattcagttggctttaatctcaatgcaaagttagtttcacatgtgaaaatcaaccacattaactgaataaaggagaaattttagtcccggcatggtggctcacgcctgtgatcccagcactttgggaggatgaggtgggaggatcacttgagtgcaggagtttgagaccagcaatttcagaccagcctgggcaacatagaaagactctacaaaaaaatttttttaaattagctgttcctcatggcatgcacctgtaatctcagctactcagaaggctgaggcaggaagatcatttgagcccaggaggtggaggcttcagtgagccacggtcgtgccactgcactcagcctgggcaacagtgagaccctgattataaatagaagaaattgtataggattatgtcaatttatgtacaaaaaagtttgataaatgctttaatagccattcgtaaacaagtgaataaagaaattcatagtaactaggaatagaaaagatttttctctgaaagaaacactacagcaaatattttagcagtgaaatgtttaaaccttcccagattggcagtatttcaaggagaccagccatcaacacttctttgcaatataatgaaaattctagtcagtgcaataaggcaagaaatatgaagtgtaattattagaagaaatagattagttgcagagaatattcttgtgaacacagaaaattcaaaacattctacagataagtagaaataatgtttagcaaggtttctgatataaggtcaatatacagaaaaaaactaatatttatcagtgatccacagaaaataaaattttaaagataccttttataacagcatcaaaatatcaaatacctaggaataaatctaataaagtatgtgcactatctctaaacaaaagctacaaaacaatattcagataaaacctaaatatcaaagacgtaatagagggacatgtcatgctaatgaactggaagactcaattttttttttttttttttttttgagacagagtcttgctctgccacccaggctggaatacagtggcccgatctcagctctctgcaacttccacctccaggcttcaagcaattctcctgcctcagcctcctgagtagctgggattacaggtgcctgccaccacacccagataatttttgtatatttaatagagatggggtttcaccatgttggcaaagctggtctcgaactcttgacctcaggtgatccgcccatcttggcctcccaaagtgctgggattacaggtgtgggccatcatgccctgccaagactcaatattttttaaagtcaaatttacccaacaacttttaagcctttcaacaggtatttgttttatggaaattaagaggcagtttctaaaatttacatagcaatagaaaatttcaggagtaaccaaggcactctttaaagaagatgaggaataaggaggataggaagaacgagagaaggaggtggagagggaggagtagaagaagatggtatgtgttctacaggataacaaacttatagtaatttgacagtagggtagtggctcaagggagacaaatagatcaatataacataatggaaagcacaaaaactcaggcaaacatggagacttactttcagacgaagatggtactgcagatcagtggagaaggtgcagtcttttaaataaatgtgctagttgaattggatatcatatgctgggagccttgacccctatgttataacagaaacaaggaatcagtgtgaggtgaattatagatctaaatgtgaaaagcaaaacaataaaacttctacatgatgatatatggaaatatctttgtgaccttgctgacaagatttcttaaacagaacacaaacaagcactaaccatcaagagaaaaaaaatgaacaattagactacagtaaatataaactctattcatggctcacagctgtttacccaagagaaatggaaatatgttcacaaaaaacttaatgtttgcagcagcttgattcagaattactcctaaactggaaacaattcaaatacctgtcaactggcacatggctaaacaaaaggtagtgcatctatacaatgacatactatttcataattaaaaggaataaactgttgacacatgcaacatgaatgaatcttgaatgcgttacagcacatgaaagaagccagactcaaaatacaaatatatagatggagaacaaatcaatggttgccagagtgtagtgggagggagaggcagttactatgaaggagcagcatgagtaaaattttgcaggggatggaaccgttctgtatcttgatggtggtggaggatacacaactctatgcatttgacaaaactcatagcactgtacatctaaaagcgtaaattttatgatatgtaaatctcaaaataacctattaagctcttaataacctattcataagctactattaacctattcactaagaatgatattaagggaataaaaaggtaagccacagagtggctcttacaaatttaaaagaccaataatatagtaatagaaaattttgaaccactcacaaaagaagctttgaaaagatgctcaaattaattactcactggggaaaggcaaattaaaattccgctgagacaccactacccatctaccagaatggctaacatgaaaaaggcaacttcaagtgtcactgaggatgtggagccataggaagtctcatactctgctggtgggagtataaattagtacaatccctttggttaatcattaggcacccctaaagtgaacatacgtgtaatctatgactccataatccccttcgtcagtatatacccaacaaaaatgtacacatgtattcacaaaaacacatgttatctgtaagaatgttcatagcatccctttttctaataggaacctggaagcacccccaaatacccgtcaggagaagattaaattgtggtatattcataccatggaattctccactgaagcaattcttttttttttttttttttttgagatggagtctcactctgttgcccaggctggagtgcagtggcctaatctcggctcactgcaagctccgcctcctgggctcaagtgattctcctgcctcagcctcctgagtagctgggattataagcacccgccaccatgcccggcttttgtatttttagtagacacagggtttcaccatgttggtcaggctggtctcaaactcctgaccttgtgatccacccaccttggcccctcaaagtgctgggattacaggtgtgagccaccgcacccagcctgaagcaattctttaaagtgatgatcacagacccatggaggtcccaagacccttttgcaaagtccttgaggtcagaactattttcaaaataatactaaatttttttgccatttcctccacttgttgacccttacattgtagtgtgtataagtactgacaccttattctggacggaggtagaggcatcaaaccatgctgtcattgtattaggtgcttacagttaaaaaaaaaaaaagtttgttttatttaacatccatgatgttgcaagaaaaagcactgatttttccgggcgtggtggctcacacctgtaatcccagcactttgggaggctgaggcgggtggatcaggaggtcaggagatcgaggccatcctggctaacatggtgaaaccccgtctctactaaaaatacaaaacattagctgggcatggtggtgggtgcctgtagtcccagctactcaggaggctgaggcaggagaatggcctgaaccctggaggcagagcttgcagtgagccgagaccgcgccactgcactccagcctgggggacagagcgagactatgtctaaaaaaaaaaaaaaaaaaaaaaagagaaagcactgattttattaagtgtataaatttagtaagaatcttgagtacatgttttataggaagagtgagcacagcacttctgctccatactcaagtgtgacggctgtcccgagggaaggagcctacgttattgagccatgaactacactggccatcttttttcatggaacacagttttgctttgaaagaaaaactgacacaaaaaaactaacgaagcatggtggtgcaggcctgtaatcctagctactcgggaggctgagatgagaggatcacttgaacccaggagttaagagaaaattaaggaaatacaaatggccaatgaataaatgaaaagaagcttaatttactaatatgatgcactgagataaatgtacaagagagggcactggcaaaattatgtatcattttagagcttagaagaaataagcatctatcaattaggaaataaatatattacagtaaatcacattatattaatatgtagtggttaaaaacaatgaggtagctctatgtttattgatccagaaagacgtacaatgcacatttaaaaagaactaagttataaaaatatcacttatgtttaaatagcactttacaggcacaacttgttttattatgctttattgtacttcacagatattacattttgtgtgtgtgtgtgaattgaaggtttgtggcaactgtgcactgaacaagtttatcaagccattttcccagcaccaggggctcacttcatgtctctgtgttacattttgataattctcatatttcaaatgttttcattattattatatctgctattgtgatctgtgatcagtgatctttcatgttactattctaattgttttggggcaccacaaacccatataagacagaaaacttaataaatattgtgtgggttctgacttctccacccacatgctattcctccatcttcctctcttccctctggcctctttattcccttagatgtgacactactgaaattaggccaattaagatccctacaatggcctgtaagtattgaagtgaaaggaagagaaggtcacatgtctctcactttaaatccacagctagaaatgattaagtttagtgagagaggcatgttgaaagccaagataggccaaaagttaggcctcttgcaccaaagagttaggcaagttatgaatgcaaaagaaaagttctttaaggaaattaaaagtgctactccagtgaacacacaaataagaaaacagccttactgatgatacggagaaagttttagtggtctggatagaagatcaacccagccacaacattcccttaagccaaagcctaatccagagcaaagtcctaactttattaaatctatgaagtttgagagaggtgagaaagttgtagaagacaagtttgaagctagcagaagttggttcacgaggtttaaggaaagaagcagtcttcataacacaaaagtgcaaggtggacccttccttacaccttatataaaaattaactcaagatggattaaagacttaaaacgtaggacctaaaaccataaaaaccctagaagaaaacctaggcaataccattcaggacataggaatgggcaaagacttcatgactaaaacaccaaaagcaatggcaacaaaagccaaatgtgacaaatgggatctaattaaactaaagagcatctgcacagcaaaagaaactaccatcagagtgaacaggcaacctacagaatgggagaaaatttttgcaatctacctatctgacaaagggctaatatccagaatctacaaagaacttaaacaaatttacaagaaaaaaacaaccccatcaaaaagtggataaaggatatgaacagacacttctcaaaagaagacattaatgcggcccacagacatatgtaaaaaagctcattatcactggtcattagacaaatgcaaatcaaaaccacaatgagattctatctcatgccagttagaatggcaatccttaaaacatcaggaaacaacaggtgctggagaggatgtagagaaataggaacacttttacactggtagtgggagtgtaaattagttcaacctttgtggttgaggatctagaactagaaataccatttgacccagcaatcctattactgggtatataaccaaaggattataaatcattctgctataaagacacatgcacacgtatgtttattgtagcactgttcacaatagcaaaggcttggaaccaacccaaatccccatcaatgatagactggataaagaaaatgtagcacatatacaccatggaatactatgcagccacaaaaaatgatgagttcatgtcctttgcagtgacatggatgaagctggaaaccaccatttccagcaaactaacacaagaacagaaaaccaaacaccacatgttctcactcataagtgggaatggaacaatgagaacatatggacacagggaggggaacatcgcacactggggcctgttgtgggatgggtggataggggagggatagttgatgggtgcagcaaaccaccatggcatgacctgcacattctgcacatgtaccgcataacttaaagtataataaaaaataaataaaataaaaagaaatgaaatagtggcattcacagcaacctggatgaaactggagaccattattctaagtgaagttactcaagaatggaaaaccaaacatcgtatgctcttgcttataagcaggagctaagctgtgagaatgcaaaggcgtaagaatgataaagtggaccttggagactcggggaaagggtgggaggagggtgagggacaaaacactacacattgggtacagtgtacactgctcgagtgaatgggtgcaccaaaatctcagaaaccgctaaagaacttattcatgtaatcaaacaccacctgttccccaaaaacctattgaaattaaaaaaaaaaattgtgctgaaaaaaaaaagtgcaaggtgaagcagtaagtgctgatgtagaaactgtagcaagttatcctgaagatctagttaggatcattgatgaaagtggctatactgaacaatagattttcaatatagatgaaacagccttctactggaagaagatgccagctaggactttcatagctagagaggagaagtcaatgcctggcttcaaagtacaatgtgaatcttttgctcagggctaatgcggctggtgactttaagttggaactaatgctcatttaccattctaagaacctagagcccttaagaattatgtcacattattctgcctgtcctctatcaatggaacaacaaagcctgttttcaggtaatacacttgttttcagtatacgttactaaatattttaagcccactgttgagacctgctactcagaaaaaaattatttctttctaaatattattgttcattgacaatgtgccaagtcactctggtgctgtgatggagatatacaaggagattaaggtttcatgcctgcaaacacaacatccattctgcagcccatggatcaagaagtaattttaacttttaagcctgattatttaacaaatacatttcataaggccacaactgccattgatagtaattcctctcatggacctgggcaaagtaaatttaaaaccttctgaaaggattcacctttctagatgctaccaagaacatctctgattcatggggaggatgtaagaatatcaacattaacaggagtatggaagaagttgattccaactctcttggatgactttgaggggttcaagacttcagtgtatgaagtaactgcaggtgtggttgaaatagcaaaagaactagaattagtagtaaatcctgaagatgtgactgacttgctgcaatctcaaaactaacagatgaggagttgtttcttatggatgaacaaggaaaatggtttcttgagatggaatatactcctggtgaagaggctgtaaacactgtccaaatgacaacaaatgatttagaatataacataaacttagttaataaaacagtggcaggattcgagaggattgactccaattttgaaagaaattctactgtgattaaaaggctatcaaagagtatcacatgctacagagaaatcctctgtgaaaagaagagtcaattgatgtggcaaacttcattgctgtcttattttaagaaattgcaccagccaccctagccttcagcaactaccaccatcaaggcaaggccctcaacgagcaagattacaactcgctgaaggctcagatgatcattagcatgttttttagcaatgaaccattttttaaattaacatatataattggtttttagacataatgctcttgcacatataatggactatagtatagtataaacataacttttatatgcactgggaaaccaaaaaatttgtgtgactcattttattatttgttttctcgcgggggtcgggaatcaaacccacaataactctgaggtatgcctgtaaataatatataatgtatatatgcatgtgtgggtgtaagtgtgcatgcatgtgcatgtgtgtgtgtgtgtgtaactccaaggacaaagatgtgaagcacttacaccaatctattaacagggagaagaaagacaggaaggtaatggaatcttctacctcttactctatatgcttctgtaccatttaaatgtattactataaagcatttttatatttgttgtggaattagaaaaacaaaaacattagtatatataacattgtaaacccttaactctaccgctgtaactcagttataatatttttagtattcttttctagctttattaaatatttctatttttagttagatattttatatcttcttagacatcatgttttcatattactacatgttaaaataattataatattccatattctgaatgagccatagcttcaacttttcttcaattgttgactattaaacaatcttatgaagataccatccatattacatttttcatgttttaaattcttttcttgcaagaaaattcttgaaattggattatggaatcaaaggatatgaacaattgttctgatgcatctcagtcttccagtgaatgtgcaggcccatgtaacatggacagtcttctgtgttctacctaaacatatatttcccacggtgctccacaatgttaattctgcagaaactaccactctgctgtttgcaaatgttactcgtgcactctttcttttccaaaaatgccttcaacacctttaaggggataatgttttctgagaaacaacgaaaaccttattcagtgcctccatatattctaaagcattaaccaaacgtaagaaaaaagatatcagaactttgccttcttgtcatggccatgttattattttaacagctaaaaatcaaggttagttgaaccaaaaaaatagttaaactagaattgtaagaataagtatt

SEQ ID NO: 1608 - DNA, 2652 bp, Homo sapiens
gtctacaccagcggtgtcgctgcccgaaagtgagagaaggctgatattgctagctggaatccaggcctgggtgctgcatggtggcgcccctccccgtgaccaccgctgcgttttctcgggctttctctggggagctgctcttgtgctgtttggcccctgcctactcggaatggaacaaagcatcgaacaaacaactgagatcctgttgtgcctatcacctgttgaagttgccagtcttaaggaaggaatcaatttctttcgcaataagagcactggcaaagactacgtcttgtacaagaataagagccgactgagggcatgcaagaatatgtgcaagcaccaaggaggcctgttcataaaagatatcgaggatttagccggaagttgttgaaatggatgaaaacaacggacttttgcttttagaactgaatcctcctaacccttgggacttacagcccagatctcctgaagagttggcttttggagaagtacagataacatatctcactcatgcctgcatggacctcaagttaggagacaagagaatggtgtttgacccttggttaatcggtcctgcttttgcccgtggatggtggttgctccatgagcctccatctgattggctggagaggctgtgccaggcagacctcatttacatcagtcatctgcactcagaccacctgagttaccccacactgaaaaagcttgctgggagaagaccagatattcccatttatgttggaaacacagaaaggcctgtattttggaatctgaatcagagcggtgtccagttgactaatatcaatgtcgtgccatttggaatatggcagcaggtggacaaaaatcttcgattcatgatcttgatggacggtgttcatcctgagatggacacttgcattattgtggagtacaaaggtcataaaatactcaatatagtagactgcaccagacccaatgggggaaggctgcctatgaaggttgctctaatgatgagtgattttgctggaggagcatcaggctttccaatgactttcagtggtggaaaatttacggaggaatggaaagcccaattcattaaaacagaaaggaagaagctcctgaactacaaggctcggctggtgaagaacctgcaaccccgaatttattgtccctttgctgggtattttgtggaatctcacccatcagacaagtacatcaaggaaacaaacaccaaaaatgacccaaatgaactcaacaatcttatcaagaaaaactctgatgtgataacatggacccctcgaccgggagccacccttgatctgggaagaatgctgaaggatcgaacagacagcaagggcatcatagagcctccagaggggacaaaaatttacaaggattcctgggattttgaaccttatttggaaatcttgaatgctgctctaggagatgaaatatttcttcactcatcctggataaaagaatacttcacttgggctggatttaaagattacaaccttgtggtcaggatgattgagacagatgaggacttcaatccttttcctggaggatatgactatttggttgactttttagatttatccttcccaaaagaaagaccacaacgagaacatccctatgaggaaatccatagccgggtggatgtcatcagacacgtggtgaagaatggtctactctgggatgagttgtatataggattccaaacacggctccagcgggatcctgacatataccatcacctgttttggaatcattttcaaataaaactccccctcacaccacccaactggaagtcattcctgatgtgctgtgagcagaatgggcctgcgattttgcaagaatgcaaaaccacatgaaaatttcaagaattcactgatctgatgcaaaataaaaatttatcattacatcttgaacccaggaagcttacagcaaagagactatgctttatgacgtcagcaatagataattccacgttgcctttgtgatttgtatatatagcttacatttgtggatcactacatagccagattcaaaaatattttacttgttccatccacagttctctacagaaagaaccaatgaacccaataggaacaaattctctgtggaaaacaaagcatagctgtagtagatacgaatccaatcacagaggaaacaggaagagaaaaacatccaagactacagtgaaaactggaaatggtctgttttcgtgatattcgtatgattaagatgcaaattttttcttaggaaaatgtgattgttaactagcattctgttttacatgttgacatttctaacacacacaccactgatttgaacttcaaaatttattttctgattatatatgctaggtctgattctgaagatacaagaattcaatggtggaatttgtctcctgaaatttctagattcataattagaagtgtttattaccaacttctcacttagattaacatcaatgatgtttgattattctggttaaccgctcacatgcataacaataatgctagaaattcaggaattataattttgtgatttatactgtgtggtaaattattcagttctcactgcaaataaatataatgtatatcaatgtaatgtaggtcagaatgtctatggtgagcaaataaaagattattttaaaatatgaatttt

SEQ ID NO: 1609 - protein, 480 aa, Homo sapiens
MDENNGLLLLELNPPNPWDLQPRSPEELAFGEVQITYLTHACMDLKLGDKRMVFDPWLIGPAFRWWLLHEPPSDWLERLCQADLIYISHLHSDHLSYPTLKKLAGRRPDIPIYVGNTERPVFWNLNQSGVQLTNINVVPFGIWQQVDKNLRFMILMDGVHPEMDTCIIVEYKGHKILNIVDCWNGGRLPMKVMMSDFAGGASGFPMTFSGGKFTEEWKAQFIKTERKKLLNYKARLVKNLQPRIYCPFAGYFVESHPSDKYIKETNTKNDPNELNNLIKKNSDVITWTPRPGATLDLGRMLKDRTDSKGIIEPPEGTKIYKDSWDFEPYLEILNAALGDEIFLHSSWIKEYFTWAGFKDYNLVVRMIETDEDFNPFPGGYDYLVDFLDLSFPKERPQREHPYEEIHSRVDVIRHVVKNGLLWDELYIGFQTRLQRDPDIYHHLFWNHFQIKLPLTPPNWKSFLMCCEQNGPAILQECKTT

SEQ ID NO: 1610 - DNA, 2691 bp, Homo sapiens
tgactcgcctgctgtgctcttgcctgctgtgctctcgtaattactttcggaaaggttttctggctacaataaaatctgattaaatttgttaccaagcaaattgaattgttcaggctgcaacctttctagaagttttaaacgttatttaaaagaagatttcaacctcactccatttcagctttctctggggagctgctcttgtgctgtttggcccctgcctactcggaatggaacaaagatcctgttgtgcctatcacctgttgaagttgccagtcttaaggaaggaatcaatttctttcgcaataagagcactggcaaagactacgtcttgtacaagaataagagccgactgagggcatgcaagaatatgtgcaagcaccaaggaggcctgttcataaaagatatcgaggatttagccggaagttgttgaaatggatgaaaacaacggacttttgcttttagaactgaatcctcctaacccttgggacttacagcccagatctcctgaagagttggcttttggagaagtacagataacatatctcactcatgcctgcatggacctcaagttaggagacaagagaatggtgtttgacccttggttaatcggtcctgcttttgcccgtggatggtggttgctccatgagcctccatctgattggctggagaggctgtgccaggcagacctcatttacatcagtcatctgcactcagaccacctgagttaccccacactgaaaaagcttgctgggagaagaccagatattcccatttatgttggaaacacagaaaggcctgtattttggaatctgaatcagagcggtgtccagttgactaatatcaatgtcgtgccatttggaatatggcagcaggtggacaaaaatcttcgattcatgatcttgatggacggtgttcatcctgagatggacacttgcattattgtggagtacaaaggtcataaaatactcaatatagtagactgcaccagacccaatgggggaaggctgcctatgaaggttgctctaatgatgagtgattttgctggaggagcatcaggctttccaatgactttcagtggtggaaaatttacggaggaatggaaagcccaattcattaaaacagaaaggaagaagctcctgaactacaaggctcggctggtgaagaacctgcaaccccgaatttattgtccctttgctgggtattttgtggaatctcacccatcagacaagtacatcaaggaaacaaacaccaaaaatgacccaaatgaactcaacaatcttatcaagaaaaactctgatgtgataacatggacccctcgaccgggagccacccttgatctgggaagaatgctgaaggatcgaacagacagcaagggcatcatagagcctccagaggggacaaaaatttacaaggattcctgggattttgaaccttatttggaaatcttgaatgctgctctaggagatgaaatatttcttcactcatcctggataaaagaatacttcacttgggctggatttaaagattacaaccttgtggtcaggatgattgagacagatgaggacttcaatccttttcctggaggatatgactatttggttgactttttagatttatccttcccaaaagaaagaccacaacgagaacatccctatgaggaaatccatagccgggtggatgtcatcagacacgtggtgaagaatggtctactctgggatgagttgtatataggattccaaacacggctccagcgggatcctgacatataccatcacctgttttggaatcattttcaaataaaactccccctcacaccacccaactggaagtcattcctgatgtgctgtgagcagaatgggcctgcgattttgcaagaatgcaaaaccacatgaaaatttcaagaattcactgatctgatgcaaaataaaaatttatcattacatcttgaacccaggaagcttacagcaaagagactatgctttatgacgtcagcaatagataattccacgttgcctttgtgatttgtatatatagcttacatttgtggatcactacatagccagattcaaaaatattttacttgttccatccacagttctctacagaaagaaccaatgaacccaataggaacaaattctctgtggaaaacaaagcatagctgtagtagatacgaatccaatcacagaggaaacaggaagagaaaaacatccaagactacagtgaaaactggaaatggtctgttttcgtgatattcgtatgattaagatgcaaattttttcttaggaaaatgtgattgttaactagcattctgttttacatgttgacatttctaacacacacaccactgatttgaacttcaaaatttattttctgattatatatgctaggtctgattctgaagatacaagaattcaatggtggaatttgtctcctgaaatttctagattcataattagaagtgtttattaccaacttctcacttagattaacatcaatgatgtttgattattctggttaaccgctcacatgcataacaataatgctagaaattcaggaattataattttgtgatttatactgtgtggtaaattattcagttctcactgcaaataaatataatgtatatcaatgtaatgtaggtcagaatgtctatggtgagcaaataaaagattattttaaaatatgaatttt

SEQ ID NO: 1611 - protein, 480 aa, Homo sapiens; identical to SEQ ID NO: 1609

SEQ ID NO: 1612 - DNA, 2588 bp, Homo sapiens
ctgcggcgagagaatctccaactcatggaggctgagcttctgcgggagaggccacagcctgaagaagaggtgggatcggaaataaacccgcctgggagacctgcaggcaccagcagcatcgaacaaacaactgagatcctgttgtgcctatcacctgttgaagttgccagtcttaaggaaggaatcaatttctttcgcaataagagcactggcaaagactacgtcttgtacaagaataagagccgactgagggcatgcaagaatatgtgcaagcaccaaggaggcctgttcataaaagatatcgaggatttagccggaagttgttgaaatggatgaaaacaacggacttttgcttttagaactgaatcctcctaacccttgggacttacagcccagatctcctgaagagttggcttttggagaagtacagataacatatctcactcatgcctgcatggacctcaagttaggagacaagagaatggtgtttgacccttggttaatcggtcctgcttttgcccgtggatggtggttgctccatgagcctccatctgattggctggagaggctgtgccaggcagacctcatttacatcagtcatctgcactcagaccacctgagttaccccacactgaaaaagcttgctgggagaagaccagatattcccatttatgttggaaacacagaaaggcctgtattttggaatctgaatcagagcggtgtccagttgactaatatcaatgtcgtgccatttggaatatggcagcaggtggacaaaaatcttcgattcatgatcttgatggacggtgttcatcctgagatggacacttgcattattgtggagtacaaaggtcataaaatactcaatatagtagactgcaccagacccaatgggggaaggctgcctatgaaggttgctctaatgatgagtgattttgctggaggagcatcaggctttccaatgactttcagtggtggaaaatttacggaggaatggaaagcccaattcattaaaacagaaaggaagaagctcctgaactacaaggctcggctggtgaagaacctgcaaccccgaatttattgtccctttgctgggtattttgtggaatctcacccatcagacaagtacatcaaggaaacaaacaccaaaaatgacccaaatgaactcaacaatcttatcaagaaaaactctgatgtgataacatggacccctcgaccgggagccacccttgatctgggaagaatgctgaaggatcgaacagacagcaagggcatcatagagcctccagaggggacaaaaatttacaaggattcctgggattttgaaccttatttggaaatcttgaatgctgctctaggagatgaaatatttcttcactcatcctggataaaagaatacttcacttgggctggatttaaagattacaaccttgtggtcaggatgattgagacagatgaggacttcaatccttttcctggaggatatgactatttggttgactttttagatttatccttcccaaaagaaagaccacaacgagaacatccctatgaggaaatccatagccgggtggatgtcatcagacacgtggtgaagaatggtctactctgggatgagttgtatataggattccaaacacggctccagcgggatcctgacatataccatcacctgttttggaatcattttcaaataaaactccccctcacaccacccaactggaagtcattcctgatgtgctgtgagcagaatgggcctgcgattttgcaagaatgcaaaaccacatgaaaatttcaagaattcactgatctgatgcaaaataaaaatttatcattacatcttgaacccaggaagcttacagcaaagagactatgctttatgacgtcagcaatagataattccacgttgcctttgtgatttgtatatatagcttacatttgtggatcactacatagccagattcaaaaatattttacttgttccatccacagttctctacagaaagaaccaatgaacccaataggaacaaattctctgtggaaaacaaagcatagctgtagtagatacgaatccaatcacagaggaaacaggaagagaaaaacatccaagactacagtgaaaactggaaatggtctgttttcgtgatattcgtatgattaagatgcaaattttttcttaggaaaatgtgattgttaactagcattctgttttacatgttgacatttctaacacacacaccactgatttgaacttcaaaatttattttctgattatatatgctaggtctgattctgaagatacaagaattcaatggtggaatttgtctcctgaaatttctagattcataattagaagtgtttattaccaacttctcacttagattaacatcaatgatgtttgattattctggttaaccgctcacatgcataacaataatgctagaaattcaggaattataattttgtgatttatactgtgtggtaaattattcagttctcactgcaaataaatataatgtatatcaatgtaatgtaggtcagaatgtctatggtgagcaaataaaagattattttaaaatatgaatttt

SEQ ID NO: 1613 - protein, 480 aa, Homo sapiens; identical to SEQ ID NO: 1609

SEQ ID NO: 1614 - DNA, 117281 bp, Mus musculus
  misc_feature (1)...(117281): n = A,T,C or G
cagagcctgaggtaggacctgaggtaaaggctcctagcccaggggacaaggaccaggaggccatttacacatccaaatgctttctcttcactgtggctggaagaccaaaggggaaacagaggtgcagacagttgggtgctgctcttctgtttattcgatttcttcttaaacccacaggtggggtggcctacacaacagagagcatgtgtcaccacagtaacctgtacttttaaaaataaagaaaacaaggggataaaatgtacagtgggatgcttttttgtaaatctagttaattggtgtatttgtgtgtgtgtgtgtgtatttgtgtgcgtgcgcgcacacactgttgtgccactgtgtatgtggaggtcagagggcagctctcaggagtcaatcctctctctccatcatggcttcctgggatcctactcaggccatcaggcttgtgtgggtagcacttttacattcattcattcattcattcactcattcattctttgagtttcattcatccataaagaatgaaatttacatagaaatgaatgggactggagcttatcatgtttggtaaaagaagccagacccaaaaagacaactatcatgttctctctcatacacataacctagaattgcatcacatatgcaacatgactgtacatatgtgacacgagattaaaaggtagattatctggagagaagagacccagagcgtgggggaggggattgggagtgtggggaccaccagagaggaaggataacatctatgcagagaaatgtcatgataaaacccattgttttttgtttactaacaacaacaacaataacaacaacaacaacaaaacattttaaatgaaaagaaagaaagagggccagcaagatggcactgtatgtgaaggggcttgctgccaagactgatgtcctgagttcaatacttgagatctacacggtgaaaggagagaactaactcccataagttggcctttgtgcctctatggctaatttctttattcaacagcaaggcaggaaggactgcctgaggctctgggatctagctgtcagtgagtttgagttctcgctggaaggtgcttacattctatctaggcagcgcatcatcaatgcattgaaccaaagaccggggcgggtgctgcacatggaactaaacgggctgtgactggagagcacctgttgggggtcagaaaggactaggaactaggcggacttgcttcttactacagtttagggtcatcacagaggagaaggctggtcacactgtgttcacagtcagaaagcaaagagcagctggcaggggctgcagggtgggagagcaacaaaggggatggcaaggagggggcccaacaatcagaggtgatttaagcccaggtcctgtggcaggatcctcaaatcccagaagagagagatgtaggagtctacagatttcccagaatttccaatgcaggaagctcccctaatgtttccaaatatacatttgctctctggacctccactgctcccaagtctccaaatgcctccaggtcccccaatacctgcaggtctatagatgcctccaggccccccaataaatacctgcaggcctacaaatgcctccaggccccccattacctgcaggtctacagaagcctccaggccctccagtgaactcaggcttccagttttactcacgtccctcaaatgtatcatgtctcccagttctgggtccctgagtccctccagggccacaaatcccccccaagactccaagcaaggagctcaccgaatacatcaaggaacaaggtgtaagttggaatcatattttcggagtatgtatctgacttttgagcaatgtgtggggctggcacaaaggattcacttgaaggagtaccagatcccagtgtgtttgaagaacaggtgggctagatgccctcaggagcatccccaagagcatctagaaactcctgtgaagtgggtgggtgggcccatgctcactagaccagcacaaacatctttattagggttttagagttgtgaagaaacatcatgaccatagcaactcttttgtttattgttttttccaagacagggtttctctgtgtagtctttgctgtcctagagcttgcttgtacaccaggctagccttgaactcagatctgcctgcctctgcctcttgggttctagaattaaaagaatatgccaacactgcccagtatccatgacaactctcataaaaacaaacaaacaaacaaacaaacatttatttggggctggcttacagttcagagtttcagttcattatcatcatgaagggaagcatggtggcatgcaggcagacatgatgttaaagaggtagctgatagttctacatttgaatccacagacagcaggaagagactgtcatatgttagaattagggttatgttagggttagagaccgtcatactagccaggcttctgaacctcaaaacccacccctagagacacacctctccaacaagagcacactccccaatagtgccagagcctgagcttatagggacacatttcaattcaaactaccacaagtgatcatgtccctgttactgctcctgcctctggtgatcctgtgtgctcaggcctaccagatgttggctcccttcctcaaaccagctcctctaatgtcttcccagctcctctgcagtcttgatcaagcttagggaagttctgggtagaatgctggctagccaagcctggactgcagcaacatttccataaaaaaaaaaaaaaagccacagacctaattcaatttgtagcctttgaagacacaacagactcagctccagcgataagctctagtacctcctcccacttcgtagatccatctgcagttcaagctcccaccaaagatgcagcctgcatccagagctgcatcccctaccccagatgatgctcccagcatacctgcatccgaaggcaagttctggagggggcagctgagagctctacctcagaattcaggtctgggatcaaggcctcttacagatttcatggctccttggataccttgttgtttcctgatattgcccagccctatttaccccaaggttatttctaggagccctttggtccttgtaaagacagcagtgaaccaataaaaggtggcatcacaaaaggactgattgatggccccaggacattcctctgtctatataggaggcaggaggcaggtgtggtggccctgcttagtcctgaagatcccaggtgaggtcttaattttgattcatgtttctgagtgtactagctttcaacctgaaaaaaatcaagcaagcaagcaatcaggcaatcagtcaatcaagcaaccaagcaagcaatcaggtaatcaatcaatcaaggaagcaaagcagcaagcaagcaagcaagcagtcaggcaggcaggcaggcaagcaagcaagcaagcaagcaagcagaggacagaaagtagaaccatgctaagaaacctgaaggccctatttcctctagaaagtctccagctctaaaatgttctgcaaccttccaagattgggtcacctgctggccacaagatgttcaaacattggagcctgtgaggaacatttcacattcaaactacaatggtctactacctgcagtgtgtgtgtgtgtgtgtgtgtgtgtgtgtgtgtgtgtgtgtgtgtatactgagctaagtcctgtggccaacaatgaaccagctctgaagacaaaggatagaagcaagaatattcctagagtcaggaacggaaagtacaaatgccctgtggtagaaaggaatcaggtgagcctcagggaccaaggcggtacaagagtggcaggaacaaaagggacattgggtcaaaagcactctgtattgatcagagtggtggagcagcacacagaaccttagccatctgttgaggaatttagatggattgcaacagggatagaaaggttttaaacctgttaatgactacccaatgctttataaagctctcagatttcctgtgaatcagagaagcaaaagcatgaagggctattctatgagaagtccagggtagaccagatggccactacccaagctcctgtccacaaagaacagcagcaggagagatcttttcctgacttagatagctgttcgtgtgactctcttcaggagaattaagtgtgattcccttctcttgggaatggaatgccaggtggggaactagggtgaggaggttcacagtaggggcttagtgtctggtgtagtcatgggctgcatacttcctgactatggaatcaagagactaaagtctaattgtgtgtgtgtgtgtgtgtgtgtgtgtgtgtgtgtgcatttgtgtatatttgtatgaatgtatttgtatatattggtttgagtatatgtgtatgtgtggtgtgtggtatgtgtgttctcatgtagtccaagttagccttcaactcactacatatccaagaatgaggatgaacttgaactcctggtcttcctgctaagggacaggggatcacaggtgtgtgtgttgctacctttcctgcctttagtcagcactgggaactgaatccaaggcttcctgcatgttaggcaagctggcaactacattgccagccccaagttactcaaatctcaaaatcaatttcttaggtggaatggtggagagagctgtgtctgcctgagggagccaggaagagtcacacgttctgctggacgaacttagtgtcccacatagggcgccagtactttttatgtgacagccatattggagaggaaaaattaaagagttgaaaattaaagttaaagacagtttagcactcagcctcaggaccgagtttgcaaagtgctcagtagacctgtggtaccacttctagcattctagcattcccacccacagcttgaattccaaagagccgaaagcacatcacaaggcagatattatttataaggttattgcctatttgtaagcacttggtaaaaagtaaccaaactctgtttccattctgtgcccaaaaaggaacaaaactcatacctgaaagcaagacattcttcatctgtatttcctaaaatcatcaagcatagaaacccaagtgtctacagtgactctgtcagcgtggggtgacatgtcccattttctgacttttctggaggtggaacatgtttcccttttgattttgagacaagatctcgctttgtgccctgcactaattttgagctgtgatcctctgttttcactcaaagcatgctaaaatcatagatgaacatcaccatgtcaggccttaccatatctctttctgaaactcccataatatttacaattttttacaccaaattattactgaactattaatttataattatattatgatatataatatatacatacattatatataatgtatcatatataataattgaacagttaaattattactgacctattttaatataagaaatcccaagtcagcattcttctagaagcatgaaaattatttttttatttcttttttcctatttttatttcttttagattcagcttttatgtgtatggctattagcgcgtgcctttcttcacgaagactccttcttttctgatgtctctagcttgtgtcaagttaacacacaaaatcaaccattatcatcccctataagggcatgacttaacttaagaacctcccaccaggtccaaactcctaaagactccaatacttccccatgcactgtggggatcaagccttgagcacatgggaccttgggaggacattcaacatccagattatagcaagaaggggaaagataatcttgggcttgttttcaacactgtttttaaaaatatttttttaatttctttgtgcatgtgtgcacatacatgcaaattgtgcatgtgtgtgtgtgtgtgtgtgtgtgtgtgtgtgtgtatgtgtatgtgtatgtgtatgtgtatgtgtatgtgtatgtgtatgtgtatgtgtatgtgtgtataagcatgtgcacagagctatttaagtccacaagagggcattgcacccgctggggctgaagtgacaggtgattgtaagccacctgaaagagtcactggggaccaaactcaagtgttttaccagatcactacatgctctttaccctggagacatctttccagctcctgtcagcactgttttaaaatgtctaactgtcaggttggattaggtggaatcccaggtcaggctttcacataagaacagtaaagaataccacacatatttttaaaaacaaaaacaaataccaaaacccaaaactgtgtatgtgcaaacactgtctattcaaatggttgtattgctggggcgtggggcagaggcacactcagagtcaccctatggctggaacagatgaagcaaaacctactaaaccagtaggacacaagagcacacccagatgacacccactgcctgtgaggagccacctcacctcttttcgctctctgagagtgtccatctactaccagacctttcttcctttcagtccctggtgactgcaggagtttctctctgagggttgtgtctcaagccccttacaagctacccaccatacaaatctttcagcaattccaggtcacatctcagccacctccacaggctccccttccaccttaagtatattctccatcagtctagaaaactctcgcttctaactccagtatgccacctgaaacccaagtctggttctcttttcagtctgtatgtgtttgtaagctttcctcttcaacttcaaaggcctcatgtacacccacatgagccctggcagcccctgcctggttgtctcaatttatgtcccaaaccaacaggtctcctaaggttagcatctgagggagaggcagtccgacatttccaatgcccaaatcactgttgtgtatatgcctggctaagtcctaaaaatgttaagcatccccaatcatagccttctcttgctaataacacaatgacacataatgggtaaacataaagaaaagaggtttgtcttggctcagggtttggtccaagggtaagggccatgtctggggatgctgctctgctagcaatgttctagagtggtacgaggcatcactggaacgggacagactcttctggcattcgctccttctacgaagcctccagaattcaatcatggtgctctgctctgatgacttatccaaccctagtaagcttccaaaggccacaggtatcggacattcagaagtgaaggagacctgaggcatccttccagtctcagtgagtctgcagtccattaggcaagtgggtgataaacagtcgacataggggggaaagcagtgataaaggatgacttttgtgacaaggagggcactttagaggaggtggccagaaaggtctgacctaaggggaggaggacatctgagcacaagctagagaaaagtgagcagcaggcctctgtctgtctgtctgtctgtctgtctgtctgtctgcctgtgtatgtgtgcgtgcatgtgcatgtgtgtgaggcagagcagctaatataaaagccttgagatgagagcaaactcagcttgcacagtgcagagctaagagaccaacgcgctggaatacagagcctgtagccggaagtggttaaatactaaggtatgcaagatcagagtgaggtcaagttaggttacgtagggttgttcaggttccctaaggactttggaatatatgtgtcactcaaatccattgtcgttgtaggacatgagatgactcacctttcaaaagatcgctttgctctctctggctactgagcagagagtacagagtgaaagcaggcagaccagcaaggacagtgtctagctactgatatcccggacttaaatgctccagcaggggcattcaaagggcagcctctctttgaaagacatgcataaaagtccatcttccctcctttgtggataacagggaatggtattgttacaggggactgagaaggtgtatatatgtacatacctgtggtataggcttgggaggtggagacaggaggatcagaatgtaatcaagatcgtcctcctctggatagtgtgttggattctagcctgagctacatgagacctcatctgaaaacaaaacaaaaacccaaataaaccaaaccaaaccaaaaaacaaacaaacaaacaaacaacaaacagtggctggaaagatggctcagcaggtaagagtgctcactgtcctttcagagagcttgagttctgtctctgatgctcatatagaatggttcacaaccacctgcagctcctgctccagcttcagcagatccagtcaatgccctcttctgacctccaagagtatatgcattcatgtggtatatacccacacccatacatagaaacaatagtaaaggaaaaacccaaatcgacaaacaaacaaacccaaacaacataaaagagcataacggaattcattcaggatatatacatggcctaacatttattttcaaatagaatgtatgtaataaaaataaatatcaaaatagagggcatatatatcacatagaacctttctagggagcatccttctcaggacgtcacgactgtcaaatcacatggtcctctctagtgttagctattgtccccctttacagacggacacagagaagacatttgtcccgggtcccacagggtgtaaatggcagagccaagagtcagctctggcttctgactctgcaagccaggagtcacccaccttgcacctgtccaggggcggcacaccgtggctctcgctctgctccaaagcagcaccctggcagccatggctgcacgcctccttttccttaggcacttctcagctaaccatcagcaggcatatcttgtctgctctttgtctgaccctgttcaggttgttgccaatcccggagcactttgtcctttttaataatgtcgtcctgaggtcaactttgcctcctcccattgccacatcagcctttgtgtgtgtgtgtgtgtgtgtgtgtgtgtgtgtgtgtgtgtgtgtacagctctctccaagagccccgtctctgtgccagttgttacagttgctttaaacactcggatgtatcatgttttccacgcttatgttgaagcaggacacgtgtctcttcctctgagtgctaaaggccagggatgaacataatagacagtagtaacctcacctttccagaaacactgagctagaagagcaggtccacttgccctttggcattgactcctccctcccagtacgaagagggcacaatgtgacaggtggtgaatatccatccatttgtgtacttagacaagtgcctactatctccttaggccccgtgataagtgacgaggatatcttgagccatcagacgctcactcagtcaccaccgcagttagggctttccacgcatctcggactgatggtccccagcattctgactgcagatgtattaaaggccaggagaagcgctgtgccagggaactgaagctgacagagggcagtggccaggagtggcaggcagccagaagtaaacaaggaagaccagactctagacacacgtgccacagccactgcggagtctgggtgaggtcgcccatgccacatgggcacaagcatggagtaggtgaccagtggagcctcctcaggagtggagttggtttgggattggagctggcacacttgcgagtcagaactctaggggttcagcgccgagatgctggtgtctgccttccgatcctggcactgttgttcatgtgtgtcaccttgagcaagtcccttaacctcctcagagctcactttctcatcaatgaaacgagtttccaataacctcagggttaagtgcctggacagcttcctagagcagtggcgagcacagaaaaatatccgggagaggagactgtgaaccacgctgctcacacttcgtggggtcctccggcctccccggggtcttagcatccgccaatcttttccaaggaacccagtcctagcctattaagggcgcgccctgctttgatagatttatttgcttgcttgggcggagcttggagcacaacgaggaggaggcggccgcggaggcggagagcgcagagaaagggaagccacccgggggctgcaggcgagacaggcggggccggggaggagtcaaagcgggttccaggggccgggcgctgagcgcaacgagtgccttgggcggcggagacaagggcgggggcgacgcttggcggccaatggagcacggcgctaccgcaagggcggtgcaggaaccccggccgctgacagtcaaagtcgccaactccgccctcgtacccgcgggatcccggagccggagcccgagcccgagcggggccgaggccgcccaaggcgcgctgcgagcgagcgaatatggcagcagaatgaggagcctggcgccgggtggtgtccgccgctgcggtgctgctgctcgggatcggcgcctggtacactacgagcctcatccttagtcggcctccgggtggcctctgggttccattcgttaccaaggacttggggaaaaagaagatccgcagcccacagagggtggtgaagcgggagcgccatccgggagagagattctgccgggatgagccggccatggggcggcctccgcggggcgcacggagccggccggcgctgcggcgggagcgctgcctgagcccgggctccacggggcttcggggcctcgtgcgtcctggcggagtccctgccgctgtctccgggaaggacacgagccccgagtggcgggcactgcagcagtcaccgcgctgaggctcccggagcctgcagggtctgtggttcggtgcgctgtcacgccaccgcactcgggcgccttgcccggggctcggcggctagcgcagcgcagcgaggtcggtcgaggagccggggactgcgggaccggccggagaggcgtgtgcgccggtgttcgactggagatcccggcagcagcagaaccgggcggacctgagcagccatgcttcccggggtgggcgtgttcggcaccagcctcacagcccgagtcatcatcccgctgctgaaagatgagggcttcgcggtgaaggcgctgtggggccgcacgcaggaagaagccgaggagctggccaaggagatgagcgttcctttctacaccagccgcatcgacgaggtgctcctgcaccaggatgtggacttggtgtgcatcaacctgccgccgccgctcactaggcagatcgctgtcaaaaccctgggtgagcgacccctcccccagccctctcttctttagctcggctcttcgcttctctccaattggacatatcccaggaatcccaaacccaagcttgttagtcccagctttcccctttccagtcggtggcctcccccacctccacgcttcgctcctgataccagctggaagcgcatccccacgtgtgtggtgcggaggctagaataggcttggattctaggtataggaaccgaatgggtcagatacagaagaccggttgctgttccaggagggaaactcggtacccagctgtatacgttagttagtgctctggtgtgtgggtgcgcgtgcgtctggaaaaggagagcgcgtggccaggaacccttgaataaagggccgcacacgtggtggcagggtttttcctgggtgtacctgtttgtgagcagctgtggcacccagtttggatcgttttgtttccctccacagtaagtgagtttactgtgagattagagaactgacagctggctggaattatctcttctgctctggaaggaagcaagtgagagtgggcgggtctatcagaacactctcagatgtgtcagaggttagtaaagattgtaatttaacctttgggcacagtctcccaggagtgggtgtctactctagttgagaattatataccttgtattcttccgagatgaaaattgtggtttcaaaggcaaggatgctttgtgtgtgtggagggggccggggtgggagggggaagccagacgctgcagtttcctttggaaacgtgcgatggcacctccgtattttgcctcgggaatattccagagacacattgtgtttacaagcaggctggggcttctttctgggctcaaacgagtgtcttgagcaagtctgttcatcagcagttcccttccatacctaaaccaaccacgctcggctattcccaggcgtttcatacttacccttggaagccagggttactgaagtggagaaaaagctcctaacaaactaggttggagaaattctaacgtaggggctaccggtcttttctttactgtatttaatgtattaagcttctggcttttggagcctggcttctttagttttgaactgaattctattgacttttagccaatgtttcttttctgtttcactgctagtttatactagttgtttacactggatttgtttgtcaagtaggcgattaaaaagttagagtataaaacctattagggcaatttctataccatgggttcctcttaagccccatctatgctaaaggcttgggtctggtccgatttgaaagcttgttggagcattcttctcccctctccggtggcatctctataggacaggcccttggagcaaccccacaacagggggataccaattacagagcaagaatgctctgatggtctctggtacttactatcattgttgtttggggcggggtctcgtgtatcctaggctgtccttcaactccctgcttagctgagggcggccttgaacttctgatcctcctgactctacttcctgagtgctgagattccatccctagtttatttggttctggggatcagacccagggcttcttgcctgttaggcaactacttcactgattgagccacacttccagcctttatctcatactttggccgccgaagcgtttagggatgtggaccattgttatacttttctggatacttctgtgatggtggtggcggcagtggtgatgatgttgcctgtgtgaggacttggggtgttgcaccatggtagaatacctgactggtaggcacgggcatctggtttcaactctcagcactggagaagagaatccatataagttcttgttttgtactgacagggctgaagttagttcctcttcagagcaaaagcatgggaggctctgttagctaggtttaccaagtgtgagaagggaacagccctgggcttatcctttcaccgtgggctgtaggcattcttcctttccttttgagtttgtttgcccgagattcaaggcagtccgtgattatgggaaatgcagaggcactggactgaatttcaaaatggttgcacaggtgttaagacttcactgcagacttaggaggcttctttcgattgtaccttcgaggctgctcctgactggcttctcagtcacggttaagaggttctgcacacataacacaggaagtggaaaaccccaaacagttatcaggctggccttggctgctggaggtttgcacatatgagcgtttgcctgggactgaagagagccatccctttaatgagtcccggtgaagtgtcctcctttctccactgtcagcaagcctgacccatggctcagtccacgttgtgacctgataaggagaaggcaccagataagtgaaattgagccggtggcattgtacacaccttcctttgatttccagaaactcccttcagagtcctactgctaccagactttgggacagtctatatgtatgcttcagcaagccaggttcaaccataagcccatttaaacagacacattaatagcagaaaaggagacttattcaaccttgagaagagggacaaacgggacccagtgaccctcccagtcggttttcaaggtcttcaagtgagaccttgcaatagaggtttaaatagaggctcagaatgacgggtggctgagcggttcctattcaggtgcaggccgccccacattgttatggctccaccctcctgccaggtgggttgacaaattgcaaatcacttacctggaataaaacctttcctctggctgtcccaagctttaagctttctcttctcccagcatgagattcctgggggctggggggtgggagtggggcagaagaggggggagattccattttcttggggtccattgttttaatagtctgagagaccaagtaaagggtgtttctttagactgtgttcattcttttcagggcagttacactgcctctgtggcatttctgctgtagagatatttctgtcacgcacagtttgtttgccatttagggctgcctataaccgagaacctcttgtgggccagccagtgtggtagttggttgtgtataaagcattttaacatggtggaggcaagtatccaaggtagacatctggctgattttccagatgagggtacccagatttggagagccgagttccagctacccaggaccatacagctagagtccaccagcagccctctccagccctttcttctgccacctcctaagctttccttcccttctgtcagagacagctctcgctctctctctctctctctctctctctctctctctctctctcgtgtgtgtcctgtgttgctttctatcccacccttggaattggttcccccatattaatgccatctcctgaatctttctgtctttgttatcctttctgggacctggctcacctcagtgggttcatccttcattgtaattcaggttataacagggagccagagacactgttcccattgactttgctcttaggaaaagccttattagttcggtggcagagtaagcaagaactgatgtctaaggtgcctggccagcctcgtgtcctataaggcattcaagaatccatcaagatggctcagtgggaagagatgcttgccgtgcaagcctggagaactgagcttgatccttggaacccacaaggagatggaatgagagagctgatttcatgggctctctctctctctctctctctctctgcactatagcatgagtgtgtgctttcaagtgtgcacatacacaaactccaaaattaacataccaatagggtatgtaggagaggctcctggttcttaagttccggcttctgtcaggagtgccatttgttcctgcggtgggattaagaattgtgcagccttccagactgatcatctgttagcatctccaaatctcgtacttctgcttctcatccccaccccctcctttgtgtacccttcaaggcgctcagtaccacgaacctttgtactttctagaactactttgaatgcatttgtttaaaattgcattcagttagcttgaataggttatatatttacatgacacaaatttcaaactatatagagttggtgtaccctattctgaggtaattaaccttactacttttttttttcaatgttttctatcaaggtttttctggatatagtagtgaatatacatgtaagagctccctctggggactggagagatggctcagtggttaagagcactggctgctcttccagaggtcctgagttcaattcccagcctgggaattggtggctcacaaccatctgtaatgagatctgacaccctcttctgaagtgtctgaagacagctacagtgtactcatataaataaaatacataaatctttaagaaaagagaaaaagaactctgtagaccaggctggccttgaactcagaaatctgtatgcctctgcctctctgggattaaaggcatgtgccaccacagcaaggctgcatgtaagaattctcacttcttttgcgtgattgttaaagtccattcatgctactggaaatccactatttatcatttgacagtgctagcttgtctatcaatcgattgatctatcatctactatctattaaaagcatttaatattatattaaaatttcagtgtatcatatagctacatattcagttgaccctccacgtttgtgagttctgcatttgtgtattcaaccaaccatgactcaaaaatacttgaaaaacaaagagaagaaactgtacctctgctgaacaaacacaaatgtttttcttgccatcactccctaaacagtgtagtaagacaaccacatccagaattctaacccattagctaccctaggctgataggttgaaagctgggacaataatgtagactacacaccaatgctcagctgttttacataaggcacttgagcatccctgagcctttgtacctatggggattctgggaccaatcacctgctgataaagataactgaatgcatatatatgtgtatgtaatatatctgttttatacaaatatatacactgcacctaaacatacaaacatatattttgattgtgattgtatccttagccatgttttgggctacataagatcttgctgtatgggtaaaatgaaaatgtatttgacccgtcccctgttgttcaacatttgggttgtttcctatcttacacaaacatggaatgagtcatcttgaggcactgccattttgtacacactagtgtgtttgtagcacaaatgcgtaaaccgagagctggtcaggaagtatattcacatttcatttgatgtagatactgccagacgagctggcactcgacacactcactgtgtttggtcagttttcttcagagctgctccctgcaaggccctggaccacagatacctagaggctgcttgcctagaggatgcccagagtacagtgtgactcacactgtttcatccagagcggctaacagctcaggacagtatcccttcccagtcagccttgggtcagacagaacctgccaaaagtcagagtcctcctgcagcagggcctctctccttagcgaatgccgcctggctgctggcctaggcccaatctattctctgtaccatgggaaaggtgaatgtgtatataaataacacctgcaaatggcatttcagtgggtcccaaggaagctgggcgaacactgatggatgctcaggaggttcttggcttcatgttgtcctgcctccgctatgcctcttacatcgttggcaattgagctctctcttggatgcaccaccctccaagaccaaggcctctgctgtgttcctgaaattcccctgccacttatctgactctggctctctgcactggctcaggatggttgtctagactgctcgctctctctctctcctccctttgaatggctggatctctctctctctctctctctctctctctctctctctctctctctctctctcttctctctctcctctctctccactctcctctctttgaatggctaactctttctctccagatccagctcatgtgttattttgagggagtgacttttctggacctcttattctaccaaagttcctcttccagcgctctgggtctttctatgtctcttgcttcctttctgtccttggtgacattctcactgctgatgagtctcgtgcctgctcgttgtccctctgttggaaggtagcccttccagggctgagctttactctgtgtcttctttaccctcactagatcatgccagataccaagtcatctagcagtcggctgccaacagctgcaggatgaccagtgaaatgtggaagaccttttcattgtgtggacacatgatcttaggaatcacaggttagggacaagacacatccatccacccagcatttctgttccgggtatgataatctgcaccccattccaactttactgtgcattgatattacccggagagccctttaaaactcagattcctgggtggtatcggggatgcagtttccacccagcccatggttgcaatactggaccagctagacactggagttatgacagcactttgccattggaaacagaggggcttccctccatgagtaatcaccctgttggttaactgtgccaaaaatacctgctgccttgcctggaatggggtgccacttgctgtcacgctccctgtccccatgtttggaggtagctgtgaaaaatagaaggtttattcaccctggggcaggtagtaaaacctgaggctttccctgacctctgatttttgcttacatggaatcttgccccaactcgcttggcatttggcatcattagctaaggacctggggcagtccaccctttcctggcagctgtgcttgcttttagcaccgaggaaggctgctgggacagaggtgagaaccgacgtctcaggccattgttgccacaccaggcattatatgggcttcagataatgacaaaggcagacttggacgtgaagggagccattctgaaatcctggcagaccctgcctttccagttcttccctggagtttcttttggatctcttcctatcttaacactgcaaaaagagagaagtgattgtgttctcagggttcctgccctggtgcacagcaggaaatgatttttggtttgccaggtaggtgtagaattgaggaagcccttggggattatataaatgggagaaatgactctgtttagggttaggaagactgaagcgtgaccaggctcattgcattgaactgataatgggtgcactcgaatgatcggttgtaggatgtgtggggctttggaaatgaatgattccgtagagtttcagcttggagagggagaaagtaactgaggttgggccttttgctacctgaattgggaggctgatcatgaaagaggaagtaaaaagtgtgcgtaatacgcaggtctgttgtgacatacttgctagctgtgacttaggaaggagcattccttgtcatgcaaagtgcggtgtgtgtggctaaagtaaccagtttcaggaacttggttggtgggccactactgggtgactttgggagaagtgtttgttttaaaaaattattactaaaaattttttttaagttatagtgtgtatgtggaggtcagaggacaacttgacggaggtggtctccctatctaccattatgtgggttctggggattgaactctctaggctttgtgcagtgtgcacttttaccctctgggtcatctcaccagccctttcgaaattgctattgtgttctggtgtgtgtgtgtcagagccagcgtgtagagggaggtcagaagacaagggtagggaggggtcggctctctacttccaccttcaacaccaggctttcatagtaactaactttggctgctgagccttcttaccagccgcacccagtgcccattgtttttgagcctgggttatctcaccagtgaaatggagcaaaggatactgccccctggggaccgttaaaatgagaaggattatgtcaaaaccaggcctggtgtccccactcattatatgtattggctcagtaaacattcatttctcattatctctcatgtgatcaggtctctggctagtttatacgtatgatgctttttaaatggggaggggtgagagttgagacagtgtctcatcttgtagtccaggctggccttgaacttggggcaattaccctgcttcagccttgtaggtgggattacagatgtgagtcatcacccatgcctgggttgaatgccccttattttattttttaactaaaagcatttctttttgagacctcatcttgtttaccccgggctggccttgaactcactctgtagctgaagatgagtttgagcttctaatctcttgtgtctacctcctgtactgggattataggcatgcactaccatgcctggttttatgcaatgcttgggggtaaaacacacaggtctttgtcaatgccaggcaagtactctaccaagccccaagtggtgcttttcaaatgtttttcatatttcctgccagatttagaaaatagcatttagaagttttcttccctccctcccttcctttttttcctccctcaaaagggaaggttatctaaggccagtttttcattttgtctttgctgcaaactcagccttcatgggctatggagtctacatgctcggatcaataaattacaggttgaaactacccataaaaagaatctgcacctgtgtctaacacatgcaagccttttcgtgttgtccaccccctgccaatgcaatagggccgtggtttctgcagtctttgcatctagctgggatttaatgttgcatgtaatatgtgtaggttccacgcaaacactgtgcttttactaaaggagcactcaaagactttggtaccctccaggatggcagaagcagtgctgaagatgctgagggaccaccatagcggcctcatggatgtgggagcagcagcagaagatttctcactgtgctcctgagactgaccgtttgtgatggggatgtgggacagcccatggaagcccagagctggtcttgggtacctgggctgtgttttcctagagttttgcttctctgtgcgtcactaatgttgtccgtccatcccttctcacgacagacagcctcccaatgcttccaatgtggtagacaattctgtctgcagtttcctgctacatgccttagaggctcagctacctggaaagaacagcccctccctacttcccaggtgtctctgctctgtcttcttctggctcctggctggcgtttctatggttaccttgggtgtttggatagagtgaaaatgctgccaggatcactcagctggagggtaacaggtatagagggagtcagcgtgcttattcttagtgcagctgcactcctatgctgagaagaacacagacttggttgccatttgcacgaatggtagatgtctcttaacttttcaagattcatttactttttgtgtaggagcgttttgccagagtgggtgtatgtgcaacatgtgagtatggtgcccatagaagccagaagagggagttagagcccctggaactggagttttggatggttgtgagcctccatgtgggtgctgggaaccaaacctaggtcctctgcaagagcagcaagtgcttttaacctgagtcctctctctgccccttagacatttcttatgttacatcattatttactttatgaaatacattgttgtgttacttttctaattgactataacaaaacaatgaaaagaaacaatgtttatgagatctaggaagaccagtcttattattaaatataagatcatgtatatgtttatatatgcatatacacatggacacggacacacacacatatatgtgtgtatatatatatatatatatatatacacacacacacacacacacacacacatacaatgctgaggatgaagcccaaggctttgaacagacaaggtatttgtctagtgtaattgtcatggagggataaagacttaacaccttcagctatcagtgtaggcaagcaatggccctcaaagaattagcacttctccaggagtgcttgttcgaagaaggaaaaggctgacatctggtgccagccagaatggaaacttgtctcctaggaagagatttcacacagctgtgaaaacctgtctgactgcattacaagagaaactggaaccagacaaggttggagatgggcgtggccacaccttagccaggacagcttagttatgcatgactcttgccttgtatttaaatctaaacctcccttggaacctggaagagggacttgcagggcagggaggggcggggcggggtatgggtgccactgcttcttcttgttgttcttcccaatgtggccaaattgaatagatctctctctctctcaaaaggcttatttgtttttattttatatgtatgtgggtttgcctatatatgtatgtatgtgtactaagtgtgtacctggtacccatagaagccaggatagggcactggatctcctagaaccggagttacctggtgttgtaactcccatgtaggtgatgggaaccgaaccctttgcaagagcagcgagtgcccttactcagtgatctctctccatgccctagtctgctccccaactctgctattcactactgattatcttcaattggagtgtagagggtggatggctgagcctagcttgctgggtcttgggatgaatttgggcttaaaatggatatagaagagagggtgggacttaagttttttttttttttttaattgtgagttgagctcaattggagtctcctgtaactctagcatttgggagcaagagtgtcagatgtctgtctataccagtaattctcaacctttctaatgctttgaccctttagtacagttcctcctgttgtggtgaccccccccccccaaccataaaattctttccattgctacttcagaactgtaattttatgactgttatgaattggaatgaaaatatctgttttctgatggtcttaggctagccctgtgtaaggatcattcgaccggtaaaggggttgctatccacaagttgagaattgtaggcttacacaatgagaccctgtctctgaatgaatgaatgaatgaatgaatgaatatatacacaaggggctggatagatggctctgcagttaagagtgcttactgctctttcagaagacctagctcctattacctacctggcagctcacattcatctatacctctacttccagggtctctgatgccttcgtctgggcctgccagaactgactgaatacatgtgatatacatacagacagacaaacacctgcatacatttaaaaagagaggggttgaagtgtggggctggggtggggtgctgtgttctagtgacggccctaggacacagtggatagagactgtccagctttctcaacagtttactgtaaggactgggcattcttgtctctgtagacttagaagcaaagaaacagagatttcacatgcaggagggcagccatctccccagcttattgccaggcctctggttgttttggttcttattttgttttttgtttttgtttttgtttttttgagacagcgtttctctctgtaacccaggctgtctgttatatatttcaaaatactcagaaatgaagaatttgaaggttccctaccccgagaatggatcagagttgaagcaatggaaaggctaattaccctaatttggccatcatgtgtgtagagctgtgtcaaattatcactccatagtctctcagtattcattcatatgccagacacattttaaagaatgtccaaaattaaaaaaaaaaaaagtgtgagcttctgtcagtactccttaagttattctctctccttaggccccaattaatgatagtatcatgtgacagatctttggggtcagcaagggacacaggtatcaggagtattagaaaagagcagctcgagaggagcccaaaatggctgccttattgagtgtgagaagttgtgcaaggatggattcatcctgaaacatttaaagacgatgctccgtgtggggcagggttggagtgggggatggggatgagatggggctgtggaaggactcggcctggcttgtgctgctgtgccaggctgtgctatggtttgtctccttgggaactcacattcaagtttaatctccataataagagattaagaagtgtggggacctttaagagacaactggggccctgccttcaaacaagattaatccactcatgtgtgtttcactttctccaagggatggggtgatatggagtgtacgcattggggtgttggtgtctcagaactaattagtggaggtttcacaaggtctaaacacagccctcgcaatgtattagtaaggactctattattaatcaggaggaaatgtgctatggcaactctcctaaattcatcccgagatattggaaatgaatgagaaaatagatgcctcatcccaccctgggctttctcgtcactgtagacttagaagcagagaaacaaagggatttcacatgctggagggcagctactagcctgactccaccccctggtgtgcctgccgaggtcagagctcagctttggtgctgcccactttgtgttttgaggcaggatctctctgttgatcttgtactctaagctggctaggctggctggccagtgagccccagagatctgcctgtcttcacttccccaatgatggggttacaggagcaccatggtatgtgactgtttacatgggtcctgaggattgagcctgggtcctcatgcttgcacaagcgttttatcaatgtagccatctccccagctcattgccaggcctcttggttgttgctattttgatccttgtttttttttttttttcttgagactaggcttctccgtgtaaccttggctgtctcagaactccatctgtagactagagatctgcctgcctctgcctcctgagttccaaggattaaaggcatgcccaactagtgccaggtcccttgatcctgcaaaaatttgtgagcatacttggcagccagactgaagcagggggtgggagtgggcttcacagtgacatcattgctacctcctgtcatcctgttggaagactctgggaaaaggaaggcacattcttcctttctccatttccatctggggagaggggcttagcagtctagagcaccacgccctggctaaagggccattgctacttggatgattataatgccttcccccacctttgagtcctgctaatatgccgtggcagcaatatccattggtgtggacactccttagggagcatgggctgttgtgtcccagcttgtcagagcgtgtgtgtgtgtgtgtgtgtgtgtgtgtgtgcgcgcgtgtgtgtgcgcgtgtgtgtatgtgtgtgtgtgtgtgtgtgtgtgtgtgtgtgtgtgtgtgtgtggtagtagtatggctgtggtagtagagaaggagagggaggaggagaaagaagaggaggaggaggagtggtggtggtggtaaggtggaggtgtgaagtgtggatttgagtgtgtaaacatgtgtgatggacggagttgggtgtgtgcagagagagtctccattgaggccaagtgcacagcaccccgcttgcattgctctttctttggaggtaatcccgggtactctgctcctctcctgcatgaatatgaataacttgagtgatggaggatgagctgggctcctctgcttggtttcctctctttttcttagagccagggccggaggagaaaagagaagtagccgtatagacagaggagagagaccgcatggcttgtttgcaaacgcttctgtttcttccagcaccgcttcgagggacaattgtttacaccccatgatgatgttgctctcagagagtcctgggagatgagtgtggagccctaagggatgcgcttgtctgatttaatatgcagggctattcacatctagagtacagaaagcctggctttccccctaaggcccatgggtaccacaatgctatgtttgtctgtggaagtgagatttagccactccttcctgactgactgaatgcagctgcctccatctacagcccggggcatgggggattccagagtcatgtgtatccggagcccacctcggctttttccagcctcttggtctccagtggaattatactggtgccctcaggtccaaaggagacctgcattgaatttcctggttcctggcttcgacatgtgactgctttttagagttattctttatttttaattgtgtgagtatatatgtgtatatgggtatgtgcaggtgatcattgaggccagaagaggacattgaatctcctggagctagagttataagttgttgtgagctgaggatgtgggtgttgggaactgaaccctttgggaaaaaaaaaaaaacctaattaaatggccagtttttgtgtaaagtacaaaaagaaagaaagcacttgatgcttgcctccatctgtactggggtgatctgggggaaagtatggtggctctgtttgttgtgtttaatagggatatggctggtgtcgctatactgtccctaaggaccatggtggaacataatagctatggggcagatggccatgaaaagagacacaggcaactcccttcctcacatgctgaattctgggaagttcccaagtgcaggcctggatgtgtttattattgccgtagtaccctgtggccatctcttgcagacataaggaagcttatgggaatctgtagctgacctgaattaaggaagaagcagcaaggaggaggacgaggaggacgaggagcaggagggccagttggtcccaccactgggctttctttgtacacaccactcatttgcagatccacgctgaaatcctacagtgggctttaactaagtcattttcctggagagctagctgaaaagcaaagaagagagactagagaggagatctgatgccttagacaggaagccctgtggaataatggaaagagaatcctgctggcagttagagacctcaggcaggtcctgggggttgggggaggggcactgtcacacctgtctcctaaacagtgcctcgggaaattaagtctctcaagagttgagcggcttgtcaatgttcttagacctaatcactaacagccacatcaggaccaaaccccacgtctcctgagaggtgtctcaagtgctatgggattcgtttgtcagttggcacacagctttctctaacaaggaggaaaacgagtagctgccttctaggaagttttcctgaggaaataaaatagcagtaaccaagacctctgcctacccagtgaactttttgtttataattagtaaagctctagaaacttagggttcggtggtggggaacactatctaaattggaaaatggactgattagatactatgtgtagccattggaattctgcattaggaagattgtagcaaaaaaaaaaaaaaaaaaaaaaaaaagaaaggaaactttataattatgggtaaagaaaaaggatacagatatttgtatcgattgatgattatataaactgacttgaccactttggtattgggtaacaggttcttgtgacacagatgactctagaggccagcattaatattacggtatgctaagaggcaccacagctagtcatttgttccttctgccttctggaatttggggagatggagctttgtttagacctgataataataaccttgtttaatagaccccaccctcacccctcatacactcacactcaaccaagtaatgaaagcctgataggtgagaggcctaaatcctgatttgtacaataattagagtgtggatgttttccctaggttttgactttatcaaaatatggccattgccctgtttagctcttcgatagcttctgggaacagggaacctcagttcagaaaacggcccccgtcgtgttcgcttgtggaactccttcttgattaatgactgttgtggaaaggtccagcttcctatgggtggtgccacccctgggcaggtggtcttgggcaagccacgcagagcagcccagtcagcggcattcctccacggcctcgtcttcagttccttcctccaggttcctgtcttttttggctccctcagtgatgggctgtgatccggacgtacaagctacacaaaccctttcctccccagataacttgtggtcatggagttgatcacagcagttgaaacctaactaagacagaaataacgggaaaaatacattttcccagggggtgtgactcagtgctgccagcaccacaaaaagcaaagaaatcagggggcggggcaggggtggggccatgaatgtgattctgtagccctctgggtgagggacagctgagtgacccaaacacacatgtgtttagcacaggaaaaggaatccagcattggccaaaggaaaagacggacttcccaaagcacaaggcaaatcagtgccttgaatcaatgactacactaggagcctctggtgtttttgtgagtgatatatacctgactctcactttaggggaggaagctaggctcctggctgactatttataaccctaactctgtgtggcctaaacccgagcacagctggagggagctgatctgttcttatcctgtcctttgctgcttgaacttgaacctgtgtttaaaaaaaaaggttttgttaacctttcccttcaaaggatatagggatgagacaggggcatgtgttctgaaatataacgtggcgagagggtagctggcaggcccattccaaggtgtgcccctgaataattgcatcatgcgatagtaagctaacagcacagtggatgcagcagtcttagcactgaggaggaggcagaggcaagagcatcaggagatcaagggcatctttagttgcatagcagatttgatgtcagtgagaccctgacagaaaacaaacaaacaaaaaacccagcaggtggggtaattgccaggactgaaccacaattgcaccagcaatgggggaggggctcacaaagctgcctgtctcctaaggggactattggcagatagtggttgttaggagagggtaccattttcttcaatgatgtagccacagctaaaccgcccttgacctactaaatcccctccctcccatccacacttgagtaggtactcttactaaactcagcgggccacacacacaaaagaagacacgagaggaggaaatggagagtaagaatttctgtgggagaaggtgggagaggaggggagaacagaacatgttgaaaatgactgtggttcattagataaatatacgagactgtcaaacaatgaaaagggttaaatcaaagccaccaagaaaacaacaacaacaataacaaaaaacctgtataaacaagaaccttgcttcggagagtcctgtgtagcaagttgaggaccaaaagggtgtaggcatgggagcctgcaagtgtctcgatcttacgactgattcgctgtagaccttgggcaggtggccgtccccaaactaagcttgctttcttgtagaaggcaggtgctagagtggattttaaccaccactccctctcattcccactttgaatatcaattcgaataacttgcaccagtgggccaaattatttgtttttgtagctagtggtggggagcagtttcattgctattgctgtcatgtagtttattagtttggtttctgctgcttttttaattctttatataaacacactacagttctgctctgtaccagaatgcgaccttccctctctgtgagggagatgaattcctagagcaaattcacagggcttagtggaaatgttgcttgctagaactgtgtgtgtgtgtgctttgtatgtatatgcatgcatgtatgtgcacacatatgtgtgcaccaacccacatgtgttgtgccctcagggtatttttggatttctttaagcacactgccaagaacacatatatgtgggtatagccgctcccaccgactgcctgacttggcagctcagtggggttctgtatagcttctgggcatagatttatcagcacaataggtgttggagatatgttagcattgtctctgttagatcctcattaagcatgggctccactggacggaggaacaacgtgcttttgccaaagaagatctgagcagatcaggagttggtcattggttgcagcctcacccaggtcagacacctgataatggctgtagtcacagaggtattggactcctgtgtcatgcttgaggctggtaaatgctgtcatctgctgtagtagggctctcaggagtgtctttactgttcctaaatgccagaggacattggcctgctcacctctggggatgagaagccagctctactgattcagggaggaaatcgccccccccccccaactgagatgagatgaaaacccaggccatatggccacccacagaaggcacagaattgcctcgtagcttccaaaaaaagttacataacagtgagtcacaaggctcagcagagagccaaggagccaatggcagctcatctgctgccacacaggtcacctttgggtcaccctacacaaggggtggcactcatctttccctgggactcatttttcacatcgtttccgtatttcatggttattatacatgaccaggcttcctatgatccaacttaaatggagtcattcttttaatgttagtgaaccctgatggttcttcttgacctatgagacatttggtgtggtgttactgacacattccagctgggtgttgggtgatccagggggtccgtgtgtgtctgtgtgtgcgcgggcgtgcgtgcgtgtgtgtatgcatgcattcatgtatatgtgtgtgtgcacgcacatgtgtgtgcatgtgtgcatgtgtatatgtgtgcacacatgcacgtacatgtatgtatgtgttccatgcatgtgtgtgtgcatgtgtatgcatgtgcatgtatgcgttacttactgggatttgaactcggggaccgttacatgtttgacaggcattttaacctttagcttaagaccaccctgcctgccccaacccccttttattttgagataaggtcttattaagtttttcaagctggccgcggacttgtgattctagtttcacctttaactgggtctttccctcattccttaaagtgtttttaggaagtcaggtaaccttggtagaaagtagttttcttctgatactgtgtgacctcatagagtctgataacctttctggcctctattcctcttataaagcaagggcttcctctagggtggttctcagcctggttgcctaggagaccacctaagaaggttccagacatcctgatgcccctcacaccagccatttctgtcttccaggttagagatgaaggtatagattttgtttttgtttttgttttttttttaagtttctcagagcccagaaccactcacttgtaagcagtacatgtcacgagcctcatactttactgtacaaaggggttccctgtgggctcctagctttgcaggtctgagttgccctgagattctgtgtctctagcatcagtcatggagactggtgctgatgattcatggaccaagctttgaagaatagggtttaaaattgacatagagactcagctaatggcaatatgagatgcaataatgtttgtgaaaatgtgacatagggctggaagtatagcttggtggtaaactgctttgcttaacatgcctgatggcctggttcaatcgtctgcatcacacatgcgtacatgcaggcatgcacacacataagcatgcaggtatatatacatacaagcatgcagacatgctgtcttagtcagggtttctattcctgcacaaaacatcatgaccaagaagcaagttggggaggaaaaggtttattcagcttacacttccacattgccgttcatcaccaaacgaagtcaggacaggaactcacacagggtagaaacttggtgacaggagtggatatagaagccatggaggaatgctgcttactggcttgcttcccctggcttgctcagcttgctttcttataaaacccaggactaccagcccagggatagcaccacccacaataggccctccccccgaccccccttgatcactaattgagaaaatgccttacagctggatctcatggaggcatttcctcgaggaaggctcctttctctgtgataactccagcttgagtcaagctgacacacaaaaccagccagtgcacatgagcacacacaagcatacaggtatgcatgcacagaagtaacacaagcaatatactacccacatgatcccaggagagagaacacttatttctggcagaggaaatcaggggtggtcaccaagaagaggaggcatttgagagagcactgaatgatggggaagaaagttgaggaaagctgggttctccagggaaactgaggcaaagtgggaaaaggagaggagagaactgaggagaaacagaacaccagtctctggagtggaatggactggagcaggggttctcaaccttcctaacgctgtgaccctttcgtacagctcctcttgttgcggtgacctccaaccataaaaccatgtcactgctacttcacaactgtaattttgctactgttatgaattgtaatctaaatatctgatatgcaggatatctgataatgactccccaagggagttgctaccctcaggttgaaaagcaccaggctacagccagggaggaattgccctgctggtccattggctgacagaactcttcctgggttggcgtttctttgatgttttaagttgaggactggacgtgagccacctataggttcagggagtctgcgttactcagtctactggtttaaacacaaatctcatgtaaaacaacacagcaaagcatttagaagttggtttgactatatgcttgaacatggtggctggtttgtgtagttgtagaatcagccagcacagtgatcctggtgtgcgtgcgtgcgtgcctgtgtgtgtgcgtgtgcgcgcacatactgcagtactacagaaccataattggcaagggaagaccttgtggtctagggaacaggagtgatttatcggtacctcttagtccttcctacgtccttatgggaagcctttgttctgctgttacccacaaagagcctgacctcacaggccccagaatgggcactgactcagctgaggtgtgactgtccacctctcgtctgtgggcaggggagccctgatgggtacatgaagctgttcagttacctgggtctgtgcccagaggacatagattctaggggaagcctgtggaaaaccacttatggaggagagctcatgttcggagcaggccttgtgtctcatctgcttgggatcagtcatgtggaaaggggaaaaggagttagcgtgagctcactcagacgcctggacacgagcagcatactgctgtggggagcgagtttatgttatagatacacccgtatatgatctataggatacagatattgatgtatacgaggatacgtatattgaatagatgaacaaggaggaatttaggtttcatgacgcgatacccttcttccactgacatgtgacatctcatggaatgttctagtttttcattttactaaaaggagtggctggccatgaccccaaatggatggatccctgatgagaaataagagacctcagccctgagatggggctgcggaacccaagacaggagtatacagtggccgcttctatgatgatgaacagctcttctgtcaaggaaagggctcccctcccacacagtttccctcattgcacaaatgatgaactggatttaagttttcgttcattgagacttcatttttttaggttgtctgaattattgaaatttaaattctgcttcatttaaactgatctgtggctcccgtgatggatagtctaggttcagggcactgcctagcaaaacagcaataatgtcccaagtccatacaaaatctctaagcaaagctctgttgggggggggggggtgtcctttctgtgcagggatatggttaatggcgcgtgctggccggtgtcgcgggtcaccgggctttgtagctttacacgcccctgaaacctttcccatctgcggtgcttaattgcttgcctgtgtgatgctgtgcgtgaaaagacaggtcctctccacctgatgacatctcgcagcccctgtgcactggccggcttactgagcatctgcgatggcgctcgtaaggaagtgagggatgttgaaggtgtagtgctctgatgggttgctctttttgtagcaaggtttcatgtaagtctaggctagcttcatcctacgccctctgtagccaaggatggctttgaactcctgatgcccttgcttttgcctcccagtgctgggactgtgtgtgtgtgtgtgtgtgtgtgtgtgtgtgtgcttgccttacatctggcttatgtgctacctggcttgtgtgcaagccatttgctagacaaacaccccacccactgagacgcatctccagccccatcagttgctttctgatgaagaagagcaagccagattggggatggcctaggaaaggtgaggatgggaactgggcgcctgggttgagctacctgtttgttgattccctgtgctgtttgtgagccagtgattccgtttgaatttgagtttgttcaaattccagcctttgaaaatggaataggccaggtttcccagtgagtccagaaccctgctggggaaattaagtgacaggaccaggggtgggaggaccttcctcatttaaaaagataattcctgtgtaccttaaccaagggttggttggcagagcttgcagctctgtgtgcttggctttttaaagcctgaattttgtttccaagccctaaggtttgataagtgatatgaagccacaatatccattgagcccagacgtgacatgagatgcttcgttttggctctatgaagaatgtcacatctcctcctctgcctatgaagaaaggtgctatacttctgaatctcatggggtatcacggggtgacgtccccaccccacttgttaatgaagctgcctgtcctttctcctgctaatctactgcctatggtcactttgttaagcagactggaacttccgggggggggagggaaggtggacagtggtgcaggaggggaggcactgaggagccagtatttggctttcaatgctgtttggttttgtgttacccagacataaactagcgtcacctgggaaaatagaaccacgtttgagaaatcgactctatcagattagcctgtaggcggtcttgattgttgataggggagggcccagtccactgtggttagtttagtgtcactccaagactggtggtcctgggaggtttagaaagacttgggttcctaccctgacttccctcagaggtgaactgtgatgttgtgatggaattaacccttttctccccatgttgcttttggtcagtgttttatcacagcctaaaagcaaaccaggacacctggtgttccagacaccagcacggctggtactcaaacctgtttatggaggattttgaaatgtcatcttgactctctgagacctgcctagggcactaacaaacattcaccgattcacggtccctgttacacccagtgtgtaggctacagtcccagtagctgtcattcttgagaggtgggatactggtcctccgagctgtggcaaagcctggctgctgtgttttctgggaagagctgagcgtggagagcggctgaggcatggatgagtgtcaacgccacactgcagagctcttatccacgcaagtgaagccaggcttcctgacttggcagcagagaagaatttgggggtgagcctgtaagaagctgagttgaagtttaagaagagactttaatagcttagcatgggagttaccggaaagaagtgctcagggaaaggatgagcttaaaccaccgtctttccaaaagccaagcaaataattgaggccacccagaaccaagccagtggaagatcccatacttattttttcttgcaagacctggctcttccccagttgtggagaacataagtcatggggttctttatttatggagattagccccgtgctctgagtacactttaggctgttggttacagatggctttgatgcctgagctcagtggttggtcacatttatggttatatcaagcgatatccagaccagcctccatcattctcaggtgcttctcaaagtgcatcccagagctgcctggtgaggccccgggctgaggatgctatggtgactctccctccctccaccagagtatcaggggctactggtaagtgagcagtcaagccctgcccacctctggctctctgctcatgaaaggctgacatatcctcacccacaagtagttactcagcatctgctagctgcagaacgcagttctggatgctatgggtcttcctggtcttctattgttcttccattttaggccgtggaaaattccaggtcatggctcagatccctggcaggtgcccgtttgcttctggcaacgtctgagtcaggatgcacagaagggaacatgactgggaaggttgtggcgaccttgtcatcttccctacttcccaagctgggccacgtggctgggctctgcggagctgtgggcagaggagccctggtcatgtgtttcttaatcacaacagcacggttccgtctttgattttccccgagcttgttaacctgcctgctaacctacctgttagttgatgggaacagggaggagctgaagtgttccccatatttcaccagaatgagttctctgggccggctcccccttccctgctcttggatccctgactgaggcaggacatagctcagcatcctggcagggttagcgttgcactcttctcgatctccggattttacctgggaacagttttttttttttttttttttttttttcttctcaatagtttctgggtggctgagtaggacaacttctacctcagtaggtttctgaggccacctctggagtctgcaaagcccaggttcttgatgtcacaggtcaggagtcaacacatgctcagcattaacctatagcaaaagaacaatcaagttctgcatatccgtgtgttttgattcttgcttcagtgggctgttaaaaaactaacctggatccagtggacaaaaagcaagtgcaacacgactgtatccatggcaatagtgatagaaatttcctggagaggtgaggacactgtttctctttctgtctctctcgatccctctccatctgcctgtctgtctgtctgtctgcccctctcccactccctctccctctctctcttgctcaaggctcctgaatgctgggagtctttatgtatttttttttaatttaaagttagagtattgtctaaaaattcaatttccttactctctgtctctttttccctctctctgtctatctctctctctgtttttcaagacagggtttctctgtgtgtagagttcactcaggtttatagaccaggttggccttgaactcagagatctacctgcctctgcctcctgagtgctgggattaaaggcccatgccaccatgcccagctaaaaactctacttccttctgtggcattagggatagagccttgtgcatgttagtcaaatgaacaaccattaagctacattctggcccagaaacttcacgttgtttttaccctgtgggaaccgctgcaaggtagcatcatggccttgtgctttatcctgcacgtgacacgcagcttgggatgagcagtgctaagctgaggactgtcttgggcgggagctaggctgagtgcacagagagctcccagccttgggtccagcaatatacactcatgaatccgaacagtcgtcaaactagagcagtgatggagccaagtcctgtcctgtttggaatgactgctgaaggaagccggaatagagtagatcgtagatatctgatctcccttcccttctcctggcacacatccttaaatccttagatctcaccgtgctgagtggcttttgaaagctaatgaatgggctgaaggctggcagcccctgcatgatgtcaggctgaggacagtcacaggaaagattggcagggttagagaagtgaggctctcagctcaacccactgcctccgggaagagagaaaggttgaaggtcaagtttattggcggtggctttcatcaccaagtcttcttaatgaagtgtctataatccgtccacccccaccccacccccattcttctgggtagcagaacacatcaggcaggagtggcacttccagagagggatgggggcactctaagccccatgcccaaaggattagtgtcctttgtcatttctttgtgtgtgtgtgttggggattgaacttagggcctcattcaaatgagccaagtgctttgtcacccagccttacaaatctgataaaccagtagatgcgtttcccagggttctgtgaactgtacaagtaaattaattgaaccagaggggaggtgacaggaacctggtttagttaattaactaatcctggcttaaataattaattttgagcctgactctccctataccactcaggctgaccttaagcatgcaattcttcttgttgtctgtactccccaatgactgggtacacatgagctctatcacactgggagacagaataaagaatcattcattcattcattcattcattcatatgtttgttttgtttgtttcaaaaactggtgctggggattgggcccagggttttgtgtgtgttctcttattaagctatgtcatagcctatttgttatgattcttactatttttaatagcaccctagtttaaagcaggtggatcagagggaggcaggatagcctggacttgtgtgtttttatgcagaggcagccctggaactcagccctcaacctatgggacctgccaccaattctgggctcatcctgtgagaatggaatgaagtgagcagacacccagttggtgtttgctgctgcagctgtgacttgcttatgggtgggggaaaccccacacatgaacctgacgtcacaagtctgcagagagagggtgaggaactgagtcgtcttttctgtggcctccaaagtgactgcctgggaatgcaggaggtgatggcgggggcagatttgagtgtgtgtgggtgtgggtgtggggagaagtagtgtgggcaagtgacgtcacgatttgacctttgaccttttcctgttcccccacactgtgtgtggctatctgagcttaattgggcagagctgtttgcttcttctctgaatgggtttcttgagttcagtcaggatgtcaggtgctgggatgggctcaactgacaggcactgtcgggacctgggatttgcaatggttatggcttaatgacaccccttctcgaatctctgacatccctgtcaaactgtcacagtattggtgagttagggcggggtttcctctttaaaataacactcgctgtggtccttggtgcctgcaaaacagtgacaaggtggcttttctattcactaggcgcttctgagcttctctgagcctggggttggctttccctttcaggaaaccaaaaccctcgaagggcaaagggtggcgtctggaattactatggtgattcagtgatagggacttctgagagaagcaactggggatgtgccctcaattctgtggggtcagaaacctgacctatacacatactcacacacacacacacacacacacacacacacacacctctacatgcatccactcattgccaagcttccagagttgttaaggagccacacgcttctgctagatgtgtgcaaggccaagagctgggagccatgagtgcacgtgtgtatggagcatactcagaggtctgagggtgtcagatgactaaattctgaacttgagtgagaaccacaaaataaggtggcagaaaatcttagctgcaagcattcatcgtgttgttgagggtcttcatttcaggacaagcagagctttttctgtcagtggcagctagaggtaaagccaaggtcctgggatctgaagagctgcctctgagtcacttgttgagctgccctgcccctttgcagcccacaaaaggaccaggcagtgtgctatccctccctggctgccagttatcccctccaaattctgagtggcatgtgggaggatgaagaacacttggtagaattgcagagagtgggacgtatctgctctctaggtgacatgtgagtgtggggacctatgtgatcacaggagggaagggctatactcactcagaggaaatggtggatacctgtatctatctatgtgtctgtctgtctgtctgtctgtctatctatctatttacctaccaattatctgtctatccatccatctatctatttacctaccaattatctgtctatccatctatctatctctctatccatctatctatcatctatctgactgtcatctatcaatcatatatctgtctacctgtctgtctgtctgtctgtctatctatctatctatctatctatctatctatctatctatctgatttgtctatttttcccccttggtttcatgcatgagatattgcgtctcagggattgagtgaacccaaggcctcatgcactaggtgtgtgctctgtcactgaggtccatctctggctctcttcttaccactttcattttaagacagggtctcactaagtggtccaaggctagccttgaatgtgtgatcctcctgcctcaacctcctaagttggttaggatggcaggtctgtaccagcctgctcagtggtgcttcgctttgatttggtttaaaagaggcatcacagaagggctgggaagtaggatgggggcggggcagaggagggccctgttaacatcctccctcttctctcctcaggatgactgggatgcaactatcatcctctgcttgggctgtctgtggggttatgtgttgttcttggaggttttagtcattcggtgggctagtctttctttctaagagctgatgcaacaaaccataaaaggactagctaatgggtgaacagtaggagtttggtggtggtctctttccaggactgtgagggtctgtggactatctttatgctcctggaacaatactagtatctcattatctctgttgtaattttaatttttttttttgatttgctttttgttttttgtttttcgagacaggttttctctgtatagccctggctgtcctggagctcactttgtagaccaggctggccttgaattcagaaatccacctgcctctgcctcccgagtgctgggattaaaggtgtgtgccaccacgcccagctgtaattgtaattttctttgtttatttccttttctttaatttttttttttttaaagacagggtctcactgtataactctagctagtctggaaatcactatatagaccaggctggctctaactcccagaggtctgcctgcctctgcctccctgaatgttgggatcaaaggtgtgcaccgccactcccagccactattttaaagttaactcgtgttttcctttgtgtatacgtctgtttgatcagactggttccgggcctctcttattgtgatcagaccagcaataaacatagttacccaagtatctctgtggtggctgatttagcgtcctctggatatatgcccaggcttggtctagccgacccacgtagtagttctatttgagacttttgaggaacccctttagtggtttccacaatgactgcagtagtctctctcccaacagtcttgaatccggttcctctttcccagagcctcacggtcacttattgtcagtgtgatcctgatcttagccgttctggctgggacaacttgaatttcatcaaggtagccttcacagatgtcaggggcgaagggtgtctgtagcttttggagaggcacagctcagcccgtcgtgaggacagatgtagctttgtgctctttttctgtgagatcatacgaatgtaggttgcaggatcggatggccagggatggatggctgcatgtttttgtgcagtgtgcctgcctcacttccagatcagcaaatgggcagattaaaaagaaagtgattgactttcaacttcagattagtgtgtgttcatgcatgcatgcatgcatgtgcatatgtgtgcatgtgtttattctttaacatttggcttaatatagctctcccctaaatctaagttgctgctgctgctgctgctgttgttgctgttgctgttgctttattttgactctttggtttagggcagtggttctcaatgttcctaaatgctgcaatcctttaatacagttgtggtgactcccaaacataaagtgatttttcatgactacttcataactgtaacttttgctactgttacgaatcatcgtgtaagtatctgtgttttatgatctttgacccccctcaaaggggtcggacccacaggttgagaaacgctggtatagattctcactgtggcactcaggctgcctggccttgaattcatgttcctcctgcttctgtctttcaactgcaggattgcaggcaagcgccacattgcctggatgttatttccatcgctactagtttgcctgtccttttgaagttataaaaacatactatgattgaggaaacccgaacaaatatgctttgaaagaagaaaggacactactgcctgtatttctgatctgcatatcttcaaatgattcaataattgtccctgcggggaatctgcaaggacccattgtattttgaatagtgaaaaaaaaattacctttgtagccggtcccattcatctaataaacatttattcaagctttgctatgcatgaaccactttgttcgatgctgaggtgactacaaaagagcaaagataacgtctctgggtctgagatgcatggagctgagtgaaagcagatacactgctaggcagtgatgggggggcggagaggctgtctgcaccctgtggctctggaccaatcaaagcagtctttgaaacatcctcaggggaacagacagttccttctccttaacctgcattttacaaaggcaacagaaagttccctggaaatggagtatttcccctgccccctttggtagttttgatgcaaacccacactcacaaaattggaggtgaactccgatgggaggaggcagcgtatcgttttccacaggacatagaatgttcaggaagttttccacaggacatagaatgttcaggaagttttctgtccttctctggtcttcaccccttaagcacctaggaggtcttctcacattaagcgccaagccacctcctggggactccttgtttttcgggatggactgaccttgatagagtccctgatctttctgacctcttgttcctcatcgctgacctcccagcccttctccttgacctcaccaggcccaggtagtcaagccaggatattgcctcaaccaggcttctcccggactatgtgtccattcccttccttctagacctgtgggtcatgccgagggcccagccagcatcaacatcccttctaaggttggcgaggtggctcagtgagtaaatagcctgctactcaagcacaagagccccagttcagatctcatggaattggggtagagacaggaaaactagttagaatgtactagttagttggtctagtcaaaacaagtgagctccagggtctgtaagtgactcctctcaagtaataaggtcgaggatgatagacagagagatcgcaacattatcctctggcctctatatgcacatacatgtgtttacacatagatacagcacacacatatacaaacatgtacacacaaagcccttcccatgtctagggttaggagcatccggcaaaggagattttgaacattagattaaacctcatttttgttcctcatttgtgttcccaggggaatgaccctgaacttatttcaagccctccttcccccctccccaactcccgtttctgagaaactttactattaacaatctgtccaggattgccacaggtggtccccaagtgtggtcatcacagcctcacatcagattggaccagccacaggtccgacaatgtcaagctgtggcaagatgactacccgtcttgggattagggattcacccatgtggcttgcacaggtctgcttgtaggtgtgagacctggctactggtgcacagttccctttgctaaccaataggccgagccccctgtgcttaaatcctgaaaaaagtggtctgctggacacttactttccattagggagtcaggactccagggatggttcaagcagaacagacccacaataacagctccaggaaacaagtctgtaatatgagagttggatctgtgacaaaccaactgggtagagcgtcctccacactcctggtcacgtgtaagagctgggagaactgagccatcctgtgagtggttgcgagtggattcttagtcactgcctgctctaataggaatgtcggctttgttaggggttaggactgtggggctggagctagagctctgttggtagagcccttgcctagaacgcatgaagctctgggttcggttccccagcacttttgaaaactgggtggggaaacacctggaactgacgtcagtaaggaaatcatggcccagctgggcattctagaacatggagggaggtgtctggaacagaattgcttagagggtggtagtggtggcaggatatgtgtatatacatgcgcacacacacacacacacacagacacacatacacctgcctgcctgcccttctgcttcactctgggggtcgctggaggattgtttagcagccccataactatgaatgcttcagagttcagccttatgtacattgggaagtgttatttctgcaagaccatgaaggagcaagtgtaagtgtctctctgttaagcatacttcaggtagtagccatgacttttgacttcaccatagagttgctcagcaatgctctagggactcatgggaattctgttgggggatggggatttgagcccagagtggcaaggactgttgacaatcattccagctctcatattattttttgtggaccacaagaaaccaagtctcaatacagatagtctggcttaatggttctacctagtgatttttttttaaaagctttactatgtaggaaggcagtatgcatttcgtaagaagcatccttacaatcatggtgtgtagtcttctccaggtagtgttaagtgctccgagtctctcttgtgatgctgagccatggtagcaaacaaacaaagctcctggtcaaccccacaaccttaactctgcaggatcatcttttcagggtctaagctagaatgttttctaggctaggtaccctaaatggtgcacttcagggcttaggaggctattttgtttataaatgattttctggggtaggacataagctcactgtaggctgaggaatgtcttgttgattccccaggcaattcctttttttgcttacagtttggtccaagttgcccccagttgccccgatgtttgactctccaaggtcagaaggaatcactccaccaggccttgtatcccagcatttaaaattagccctgctgtagagagactttggctcactctccacaggcggggagcttggtgcccagagcctatcagagggacaaccaggctctcatgtccaaccctaggtagatgccatcacctcccatggttgcactgacagattgtatattccagggcagtttagtatcagaagtcactgtctttgcccgtaatcgcccgaggatgtgttgaacatcacagccaaatatgaacagcattcagggaggcagcagacactgcctctcttggcatctctgaggaaggctgcgtgttgctatggcatttggaaacttccatttcctttttagaatcgttctcaatatccttatttggtggacgaccaatgagaccaaaaacagtgagggggtggggacttgagcaccgtcccccccgcccccttcctccaagtgactaacaggtgcaggtggcagagtcagagtggatatgctggacaaaggcgtgactcacatcctgggtgggatggagtgggatgctgtgagatttcgtcatagcacacaatttaaaactcacataaattgtttatttctggaattttccatgtaatatctttggactgtggttagccatgaatattgaaactgcagaaatcaagttcagatacaagggcctaccatgtttctgtatattcctccccctcctcctcctcctcctcgtcctcttcctcctcctcttcaagatggaatgcacttatcccctgcctcaggtcctctgtgcttcttcaactagctgaccttgtctgctgctgaaataggacttagcttgtgacattggctcatgtacgttgttgcatgcaccttttcccctcacctatttcatgccttccgagtgactttgcccagaagactcgtacatactggctagaatgcattcagccataaagaagtagcaattcctgccatgtgtggcgatgtggacagcagacatgaccgtaggtccagtaaagtcaactaggcacagaaagagatagaccacctgacctaatgtgtaaaaacttaagagttgggctgggcgtgtggcttagctatgggggtgtggcttagctatagagcttgggtgtggcttagctatgggggtgtggcttagctatagagcttgggtgtggcttagctatagggtgtggcttagctgtagagctggggtgtgactttgctgtaaagctgggggtgtggcttagctatagggggtgtggcttagctatagagcttgggtgtggcttagctgtagagctggggtgtggctttgctgtaaagctggggatgtggcttagctataagggtgtggcttagctgtagagcgtttgctccagcaggcacaaagtcctgctttcaattccacgagaaaaataaaaaagtgaaaaacctttccagaagctggggagaggcataggatggttttcctttcatatctcccaagaagaatttgacgggcccacattgactcttagatctccaggttctagcactgtgaggctgtggtactttgtcccagcagcccttgccaaccatcacgtcttcgatcttgaatcttctctggtccttcctaatggcgattaaatcagtgaactttaagcatcttaaaatgcttaacgttctagcacacggcttccaacaatcttcctttcagagtttgttcctcatctttgccacctaatgctggatggccccagagtgctggaagttgcttccccttcgggcagctagaaggtgaacagagaaatgtctggtgatgataagggatgtgcaatagccggtggtgacatgataaaaagacttggcatgcacatgtggtttctgatggcatatcagacttctgtttcttagaatcctactttcttgttctggtttgaatctgaaatgctccaccccccacccccaccccctgcagcccccaacaggctcatgttttgaatgttcatcccctccagctgatggcactataataggaggctgggagagtttggggagcttgagcatgcatggtagaagctgtttactcagggtatgtctttgaaggccataacttagtacctggttctggcatggtctctgcctcctggtcggttatgaggtgaatggtttccatgacatattctgctgcattatactgatgccacagacccagtctctctctaccatgtcctttctagcatggtggatgaaaatctcctaaaaccacaagcctaaataagttctctagagaactagttctataaagtatgtgggccagaccatgggcaactaaagtacagggttcccttccagacacacacatgtatatttgctgagtagatgtggtccactgcccatggcaggcgtgtgtccgacagacagcattgtttaagtaggtcaccatgatgggccagggagatggctccattaataaagtgcttgccaaagaagcaccaggagctgtgtttgatcccccaaacccatgtaaagctaggcacgctgtcacacatgtgtgatgttagtgctagggaagtagggacagttgggtctctgggactggctggctggctagcctaggctactgagtgagatccaggccagtgggagttcttgtcttaaaagcaaagatgaagaatgcctgaggaatgtcgcctaagcttgtcccctcgcctccatggccgtgtacatacacatgcacgcacacctttgcacacacacaggtactcacatgactgcatacatgcacgctcacaggaacattatcgtgagggctggagagatggctcagcagttaaagagcatcggctgcttttctgaaggtcctgagttcaaaccccagcaaccacatggtggctcacaaccacctataaggagatctgacgccctcttctggattgtctgaagatagcaacagtgtacttacatataaataaataaatatctttaaaaaaaatcttggaaggaaggaaggagggaaggaaggaaagaagtcattgtgaggctcagatggccatagccagacccttggctactattccccccacttcctggcctggtctggctgtacctgcatcccaggttcttcctgggccgaatggcttccttcctcagaaggcccgtccttcctgcactgcagcagattccagcttccacacaggatggcagtgtcatcaaatcagctccccatctgaccctaacctcacaccttgcttctctgattcctctggtcctgcacggccagttagcatggcagttcttggggcagagttttggatgcctcagcaaatgcacacatgtttgagctacttattggtttagttattcatttatctaattattcatttgtaaatctatttattggtttatttattatttaggttaaggacagggtcttgctctgtagagttctggctgatctggaactttctatgtagctcagactgatctgcaactcagagatccacctgcctttgcctcctgagtgctgggactaaaggtatgtgccaacacacttggcccatgtttgaccattttgcatataatttgaaatagattccactgatgattcaagtctttgataggcctgtctctgctagactggagtcttatggctgtggcatctttagtctctggtttgtggcctgattgggccgggaacacagctgagcttttcagcaaagtggacagtaggcacagagtccagcatggtggctttgatcccctcttcttcctgtcctcgccctcatcacttctgctttaccccgtcaagcaaacatagctccagcctcccttctgtcacctagcactcctcccctcctcctgcttctcctcttcctctccctcctcctcctcctcctcttgcccctcctcttcttcaggaagagtctcattggaacacacactggccttaaactcatcatacagttgaggataactttgagcccctggtcctcctcctcacctgcacacatcttctaacatggcttccatttctgccactctcaagagatgctgtcttgagtgatcagatccacacagtggtgtgaagctccagagggtcacatgctctgctgagggacatatggacacacctgtggcctgacattgctggtccctttaagctcagacatgtgtttgagatgttgtccagagccatgaggattccttgctgtagactaaacctcttgattctgtaaaaaataccccacaaggatgctgctgtttattttaaagcaggccggggtagcgagagtccagaccctgctctctccccctcctgctctttggctgtaatagtcttttcttgatttctgagccatggatttgagactacagaaaccagtcactgctaaaggacatgagatacatgcccttggttctgaaatatatgcagcaacagcttagaccattttaattctgtgactatttgaatatagggacaaatcaggcaggatcttggtctcttcagattaagagcacaacgcaagcacagagcatcactaaggcggccgaaagggagagagcacagccagggtgacctggagatctcatttcgatgcatattatttcctcttcactcaaatgtgagaagaaatggtcctcaaccattcctcaaccagactgtcagggagtctggcccctgggaggacaggatctgctgtgtgtctgctaagatcggaaagctgccagccagggacactggaatgtgagctgctgtcccctctactcacccgtgccacctgtggcagctgctgagcctactgcttttactgtgattagtttctgttcacgtttgcaggtgtccccatgtcaccctgtaactgacagcagtgctgtcatagcaggattgatatttgaattataatcaagatatatatatacacacacacatacatacatgcatacatacattcatgtatatatctgaccttttcctcctgacaaagttattatgtatatatatatatataatgtatatatgtattattgtgtatatatgtatatgtatatatgtattattatgtatatatctatatatgtattattatgtatatatgtatgtatatattatgtatacatacacattattatgtacatattattatatattaataataatatattattatatatacatatatatgtgtgtatgtgtgtatatatatgtatatatatgtgtatatacatatatatgtgtatgtgtgtatatatatgtatatatatgtgtatatacatatatatgtatatgtgtgtatatatacatatatatacatacacatacacacacacacacacacacacacacacacacatatatattacctccatcacttgttaaaagctgtctcttctccaatcaccatcttactcctccagtctagagggagctttgcttctttgagcagcctctcccctttgtcccatccctcctcttatcccccagcctctgggaacaccctttctactcttcctaggaggctgactcactgtaacctcacctgtaagcactgtatatgtcttttggggtttggctgtgtcacttagttttatgtcccttaattcatccactcatattgtcttgagtatcaaatggcccttttaaaaatgatttttgtatatttttaaaagttttgtgtacagtgtgtctgtcttgtgtgtgtgtgtgtaagtgtatatgaatataggtgcctgtggaaggtatccagtcctctggagccggagtaacgggtggttgtgaattgccccattgtggatactggaaagtaaatctgggtcctctaccaaggcattgggtgctctgaactgctgagccatctctccagtcccaccacaatgtccttttaaaaggctatatggccaggtttagtatcacatagctttaatctcagcaggtgggagacagagacagacacttgctctgtaagtctgaagctagcctggtctacatagtaaattccaggacagccagagctacattgtaagactcagtatcaatcaatcaatcaatcaatcaataaaataaaaaaagcaatatgacatttcattatttctaccctcttttctttattcattcatccatcgatggacacaatgatctcatatcttggcttttgtgactaacgctgagatgacatgcagagtacaggtgtctcttcaacctgaggactgaaattcctttgcagttggctagagatgaggtttgctggcttgtactgtattgctttgaaatatgcatagattgctgaatggttaaagtaagctaatacctgtctatacataattgcaggggctcctgcctgtctgtggggaggatcagaaggctggaggatgtattgagaacagaacagacacataccagggtgattttagcaaaagatcagggcagaaacatctattctgaagtgtttcaagggctgtgcatgttttgaactagtgatgcttgaataaaaatctctctcatatatatatatatatatatatacatatatatgtatacatatacatatatatgtatatatacttacattgaaagctgttctctgatttaataggaaacacgtctgcttttgactgctgaaaacatttgctagcaaaatggcttccagcaggccaagccagcccccggggaaggagtcagaactcaagatctagagataagggaagctggccggagagctctgtgggcagccttggagcatggctgctttaatcctggatcatccaggatccatgggtgatggtccaggagagtggtgctttaaaaataaaggaccgtggtaaggaacaggccttcaactacacaggagtgttgggtaatctgcgattgcagagttggtcttacattccctggaactatttgtactgatttctagaacccagacttcttcattgcaacctggagggcaattgctggccagcagtgatgctatcagattgggagtggagagacccaggtgcaaagagaatcacctgcatagacatggtcctgtggagcagctttcggtcttttggtttgcatgctgggaatgaaactcagggccttgcaaacgctaggcaaactggagcataattcagactggtagggggaattctagtggtctgatgaaagaatttacccttaagaccgtagtagaaagaaaataagcttgtttggtacatttcaagaaaagccgtgagcacagagtaatgctcggggcagggaggccttcagtttgagagagtccatgttcgtgccgtaagatgaaccactttgcactaattttccatcagtaattccagtcacataaacgaaggcaaccctcactggttggtgcttcatcctgggctgtgtttttcagggtgagccaccatgcaagccattcccagcatgaacctcctgccctgcagatgagggccactgtgtcgaatgtgtagctgctgctcattctgccccgcctcacccttctgctaccccactgtttgggtggaatagagcggtgatcggtggccttttttgtcttgttttctgtttgggggatacttgccaaaccagtctggcactcaggtctttttgttgttgttgttgcttggtcctggccttcttctcccaacattgatcaacctaagaatagccctgggaccccctgcaactgtgactgcccagtccccatcctgaagcaaagatctccaggaacctcttgagtgtgggacagataacctcacgaagccccggttaagttagaccatgacaccgcacagctccgtgctcaatgagagagggaatctggtatctaatacggatggttctgtgtagatgggaggagaccgtgcatgcatgccgcttcatccactgcccagatcgggggaagtgctgggcaaaggccagtctttgtcactagctcagcctccctgagggtcaaataaaaaactcctaaaaaaaagcagggtgtctctcatagctactaaagggaaggcacgcaggtttatttgaggcagacaagcagatagacagactcacagacgctaagcccgaagtggtgttgcatttttgagcatctatgggcttggcttcctcaggacagctatcctagctttctcagacctgcaggcacccagcagtctatttgaaatggcaggtgatctctatttgttggttggttcgttcatttctccctttttttcttaatctccgtatgatttgtgtgcttatatgacatgtgagttgtgtctatatgatgtatgtgtgagcgagggcatgaacatttcatgaaatgtatgtggcggtcaaagatctacttctggctgcccttcttgctttccaccatgtttaaggtggtgataggggtggaatgagggtggggtgtgtgtgtctccttgatgcttctccccttcgtgttccaggctttctggaccctccagattccaattctggcttttatgtgggttctgggattcgaactcaggtccttatgcttacatagcaagcctttcccccatggagcctttccctcagtccttctctccttttcaatcgtttaccctctgagtctccatctctgctgccaggatggtgggataagtattaaagaatgatactgttggtgggggccgtggatgtggctgggtggcagagtgcatgatcagcatgaggaaggccctgggctttgcccccatcatcaatcaataagtacaaacttgaaaagtagatagagactggctggggagacagttcagctgattaaacggcttgtcttacaggtatgaggacctgagttcaaaccccagccccgaataaaccaccactggtggcacacacttgtaatctcagtggagatgggatcagaattccacaagcatcctgggtttgagttcaaggacagtctgggacggagaccttgtcaccaaataaaaggcaggggtgctgagtttcactttcagctgccttgaccttgacttatttggactgaaaagtcccctacactataagaaccagtagacttattcggcctgacaggaactgccagccacagatcgtcatttgcattttaattaattacaacaggaggaaagactcagatttccagccgcattccaagtagtggccttccaaggactcagtggtcacatgggctggaggttccatgtggggcttgagagatagcagctccagccttccagacggtcctgcaggccagtttcctgcagtggagtgagggcagaccagggtaaaatccagggcagggaccaggagagagcagcagaaacctatgataaactttgcggtggactggtccctcttctcacaacatgaccttcatctcatgacaacatagattttctctgaaaatgactggaaaggccaaacatggagtcttccagaatgccagacacacaggccttactcacccagagcttctgagagtgacaggtgactagccgtctgccctcagtgcgagctgacccgagcagggctcttgagtaggagttccacactaacacagtgtctttgacccgatgtcccgtaggaagagcctcctgctacttcttaggctcaggagacatttataggggaaactggagaacatgtcaatacagtccctcatttacaaatggagaggataaagccacagccgaaagaagtaggggcctggcaagtggcaatgaagagcagaaatgaaaaccacaccacccgtcaccactgcaaatcgacttctgggaatttatttagctgcatgaacgtaactgtatattgcaaatggtcatgatattgaataattgaagcagttattcccctctctgtctaggtgtaagagagtgcattaagtgaactgtgtcacagtaatataatattatgaagggcagaaaacctgttacttagatttgcaaatcctggcatggaaaggtgtctggtgtgttagtttgaataggaatagtcccccataggctcatatgtttggatgtttgtccctagttggtgaaactgtttgggaaggattagatgatgttgcctctttggaggagatctatcactgtgggtgggctttgaggtttcaaaactctacaccattcccaattggttctctctgccttatgattgtggatcaagatgtaagctcttagctactactccagcgccatgtctgtctgtctgtctactgccttgcagcatctctgtcttttcttgctaggattcctctccctccagatagttcttccttctgccacgtggctcttggaatcgagcagtcaggcttacgggctgacctttgacctttgtgtgtgccacgacacatgtgaccatatgtgtacatgagcgtacaatacaaaaataaataaatagggggaaagaaagaggaaaaagcagctatgggaagctgcagagccaaagcacctttttttatgatgagctaaaagcagtctcgagtgggtacagtatgtgtttggaggtgctcagacaaaggctctagaaagaggcagctctggctgggtggtgtagcagtggcccacgcctttaatcccagcatttaggatgcagagacagggtagatctcttagttggaggccagccttgtctatgggatgaattccaggatagtcagggctaaacagagaaaccatgacttgaaaagaggcagctctgaagatgccccgggtatgtttggtttgagcctgtgccctatggctgtgagcttatgtaatgactggtgatctgctgcaacaaatggtctgctgaggtaagctggatgccaccttgagtgtgtgacaatcccatgagacagggttgtatcctcgggtttcagcctccctgggtagctatggatggtcttgaacttctatctatctccccagtactgggattacaggtgtaaaccccataccaagtttatgcgcttctggagattgaacttccagcttcatgtatgccaggctattaataactctaccaactgagacacctcccgggctctcccaccatatacttgcctccacattcatttgtctggtccgctgcctcccggctgctgtcttgcgaacacactatgctttctttaacctatttcgtggaatgcccaccctactccatctcctctccgcctctgggtggtcttttaagatctgccctgaacacctgctcattttcctacttcctctcctttatataccaagaatctggagcgtgacgccagtgctcccatagtgccttgcgcttggcctgtgcgctcccatgccgcccagcacttattgtgtgctaggctgtgacactgtctgtaaccattgttctccttggctcccgtgctattcaagactgcgcttacttcatcttggtattcatgtaagaagaaaagggttggattctgctgctgtctgataaagctaaggactcaggagacgccaccgtaacagggggagaaagaacttgatttctttccagaggctagcctcacttcgcatatcattcctctgaaattcacagtgtggctgtgccagatgttgggtaagggggaggggtctttgcttatgaagaagagtaatctcccactgtgcctgctaacctgcagagatctcctccagtgtaggtgctaccccttttttctgtttatggcctgctgatgttcctgccgcggtggtcagtaggtctctttagctcaatggttaagtctgcaaaggagatgaggataataggaaggcagattccaggtcttttcatgctgtccctctcaccctgtcgggcacccactggtctgtggccaccaatccatgaaaagtcacccagatgagggtcatgatcctagctgcacagcagggctgctatatgcagctaatgggggcacagtgaggtagagtccaggtagacagggcttcatgtgcctttgtgtggcatgtttccagccaacccagacctgtatgtgactgatggcactctggagcggtttatgaccagacacagggagaggaagtgggtggggcggaggggcagcttggcttgcgctctctgccttctctccccagtggcctcacttgggtggaagatgtggtcagagtgtgagagaggcttccatggcggagcagactgtgaggacaggctgtggcttcctgtcgcttcctctccagcaacacccatggtgggtggtgggtgtgggggatgtgacaggctggaagccttgggggagacctcgggacagagggggcattgatgagaggaaggtgagggggatggatgtggttacctttttcttcttttctctcccgtccctgaaatgttgcattagtggaagtgtcaccatcgtcggctgatgtggaaatggctcatttgtcttgcttctctcttctgttttcctccaggcgcttgcctctatgggaacaccatggaaccagggttggaggatctggtggcaggctatgcagtgatggtagcttcctggcctggaaacagccacacgtgaagagtgtggctcattgttttgacttttggtcctgcagctgtgggatggttcagaaaccgccgtgtaggtctaggcagcctgagcatgagtgactgagaagctaggggctccccccactcccacccctatgtggagagagtagaatgaggacgctaccagggagtgaccttgcctcggtggtttttgaatattgcagtgggggagctgatgtttaaacgggatgtgcttttatgccacaggcaccgagcaagcgactgcttgagagcttcagggtttgaagggagcagaagaacttggagagaggagcctgtctcatcagcggttcttagccagggatgcctcatactgaggacaaaccaggaggcagatgtaaatggccacattcaagtttgtattgagacatgagactattatcttggaactttccttataactaatgaagagtttggttcttaaaatgcaatttgcagggggccaggagattattcagttggacctgggttccaaacccagaacttttcttttttttttctccatttatagccagacatactggcaggtacttataattctaactctggggagacagaggcaggcaggtctctagggcttgctctctggccagcttagcttaatttgtgggtcccaggccactgggagagaggccctgtctgtagaaataaagtaggtcgctgtgtgtggtggtacacagcttaaactccagcacttgggtggtagaggcaggcggatctctgagttcaaggttagctcggtctacttagcaaagtccagataagccaggtgtacccatcgagacctttctatgtatttcagataagcttctaaaacactgtttccctatggtttttcacacatccttagctccctttatattatgtctctcttcactttcctacttaaaatgcactctgtgtttccccttttcccttcatagcacctgcatcatattatccccatctctagagctccttcctccccctcattccccatggtcccttgtgctttcctggtctttgcagttacttaggttatacagacaaatccaaaggttcggagccgggacccacacacaggagagagcattgcagcctttgtttttcttggcctgtgtcacctcacttggtacattttccagctccacccattaattttcaagttttaggagttttgtttaggtaatctatccctggcaattctggtatataaactgcaccgccagctaggacttagcgcagcggttctcagtctatgggtctcggcccttggaaactcatcttcaagggtgtttacatcatgattcgtaacaatagcataattgcagttataaagtagcaatgaaatggttttatggtgggggggtcaccacaacacgaggaactgtattaaaaggtcacatggcactaggaaggtcgagaaccactgacttgaagtgtgaggaagttacaggtaggcaggggtctgggttgttcaccaggctaagctggtgccacctcatctaaggtaggtatcctgggagtatgggggatacacaggctggtagggatctgagaccctcacttggctgggtcagtcagtatataaactgtgaccccagctggatgtgggagtaacacaggcatcacaggcagggacctggggcattcacctgactggactggtgcttaagtttggtggcttcccctaggcctgggggtgtggggacatcatagtaagtgacgttctgggctacaggctgtgagacttgagctaggacctgagagatgcctgacttgatggccaacatcccatatggtggtggtggtttattttagtagacagttatttgggtgtgtgaagcatatcacagatggtgtgggggaagaagacccagcacgagcaggtcactttggctttccgctctctgacgtttcatcttagaaggtatattggggttacgttatgattgttagggcctattactaagtcctgggttgtgtgagttcttaaaaatgtgtcttgatgggaaaggctccctgaagcagccattctctatcacatcttcccttcccttcatttcccgtgtccaccaacctctctccccttgccttgctgttgcagagagagagagagacagagacagagacagagacagagacagagacagagacagagacagactgacccctaacttttgtcttccacaaacagatctctgtctttgcatttttgttgggttctttccttgtttcctctgggaaccccttccctggaacactgcttcataaacgtggctcaagagattggagagtgtagctcaatggaagagaacttgcctagcatgggagcctggggtcccttctcagacaaatgaaagtttaaaaagtgagagataacttggaatccattctcagggctttacctgagcttccagcaggttagtacgcatgtccagggactgtggtgtcagtgaaaacatttggtaccattttcagacacctaggaagatggagtctcaacacgtgctttctcagcaggtcagagcaaaagcagactggcagctgtccactttaagatactccatgtgactaggatgtctgaataatcgacaagtgccctgctcctgaaggaggaccaacaggaactctcactgatggcagcaggctgtggtgttccgagagagtaatggtcaaaggtgtgctgcaggagtgtgggtcataaaaatacattattcgaagtgtaaactcacaacgaacccaagatataatagcgaacgaggcctagggtgatgcctcagtcggtgcttgctgtccaggcaggaggacataactaacctcgatcccctagaacccaggtaagcataccaggcacagtggcacgtgcttgcaatcccagcctggtgaggaggatacacatgcatccctggggcttgctgtcccgtcagcctagcctacttggtgagtaccaggtccctgagaggcttgtctcctaaaaacaaggtggctgtcatctgacaggtgagttgtccactggcttccacaaatatgtgtgcatgtacatgatgaacactcgcacacaaaagagtgatatgataaaaataagaaaaaggagataataaatgaggtaataaatattagtagaaaacattttaaatgagatttttaccacccccaaacccagcccaccctccaggctaggtgacctctggggattccttagagaggagccatgtgctcactttgtggcttaggactttagcttggagccttcattagcggtcggggtgtgaagggctgtggaaatgaacagttagcacgcgctcaggctggtgcctgagatcagtggataggaaaatgtgaatttcaagtttgtgtttccactgctagcctcaagggcctcaggtggcacccccacccctacctacacatccttctcacttccttcccagccaggagtcctcacagggtatagtaccttgactagtgtctctccaggttgagtggagctcacatcttgtcaaaagcatcgctaggagcagaataaggaacagcctgagagatacagaaaggacctggcctcctaatgaccacttgagacagtagagcaattgtcctttaactttgtgattctaaggagttacattcagacttcaaacctggctgatagggaaaggctaattgggggctggagatgcagctctgtgggagagtgcttgcccagcatgcaagaatcaacaaacaaacaaacagacagaaccaaagaaacattgtttccatctagactttgtacctccgaggtgtgcagtctatcttagattttgattgctgtggtaaaacaccttgatcaaaaacccctccagaaagaaaggtttcgttttgtttatacttgcagataacagtctatcaccgagggaagtcagggcagaaatctgaggcaggaacctggaggcaggaactgaatgaagcagggtcatggaggggatgctgtttactggattgctcagccggctttcttatacacttcaggactacgtgcccaggggcggcactgcccacagtgagctgggccctcccatgtcaatgactaatcaagaccacacccctacagatttcctataggttgaccctatggaggcattgtctccattaagatcccctctctaagctgggtctaggtttgtataaagttgacaaacccaaccagtacacagccctaccaggcttcagatgttgcttgtgcaaaaatagcttgggggaactcaggcctcagtgctcagccaaggtgtagcagcctttggatcctgtaatcaagagcttccctccaggaccggttgttctcctgttgtggtcaagatgatctccaaacatagtctcttctgacatttggtggccacagagtcaccaggctcagcctggtgtcctggaacctgttaaagattccttggtgtctagaaaggtaccatccagggatacctggagtctggatgcccacatctaaggaagtaccaggcccagcagagagtagggtaaaacttttattagcctgtgggatatgacattcctgagtctaattatcaaattttgaacagagtatagaaagacacaagaaaatccttgctatagaggtagtttattttattttttattttaaaaatatttatttatttacttatttttatgcatggtgttttgctgaatgtatgtatgtctgtgggagggtgtcagacccagaactggagttagagacaggtgtgagctgccatgcgggtgctggccattgaattcaggtcttctgggcgagtagccagtgctcttaactctgagctgtctctccatctcttatttacttttttatcatcacattttaaactcttcctggctctctctgatcttctcacttgccctctcccatttgtcaaatgtttgccaaggtgttgggatttttctgaaagccacacccttctgcagacatgtcctctctcttcggaggtgtgagacaaactcaagttgtggcttcttcaatgagtgtgtggccttggaagtttggcttagagaggcaactgcaaagactgggatagcacagtcctctgtcacctctgttgcgcccagtgggttgtcaggacacaacatcatggtgtcgccaactgcttcgtggtttacagaaagatgccttaccttgcttttgcttttcacagctgtgaaataaacagtgctttacaggcaaaaatggaagggcagagaggtgaaggggcgtgtctcaagatgcagataacggaacgagcttgtctgcaaccactaggacgatgctctcttcccaatggacacagccagccttttccagagcaaaagaaacctgaagagaatctgaagcatttggcaaatggctgagtcccccggcttctcgcccagtctccattcgcccataagctctgttcctagctcaaggactgcctctccagtgatgcaggcctctgcttctgggttctcagagggatttctgctgtaaccgtgtccaccttttggagtgaccagaggcattgtccgactaagttccagcctttcggcataacagttgtgttttacagaatacagagttcatgcttaagaaccttgcaatctagttatatatgtttttatatgtcacacacacacacacacacacacacacacacacagagagagagagagagagagagagagagagagagagagagagagagtcataaagatggttaagaattgggaacctgataggctgccccaggatgaatgagatactaagtcattgttgggaacaggccagccctgagtcccagttgtgccttccagtcttcttgtggcctacaagactacacgacataggaagagctgcagaaagatcaaccaggtgttgtattggggacaccaagccccacacatacctgtttctatggctccctggcattggatctctgcactgtgtatgcctatcaggatgggcctgtgacaccccaggctgtgtatgtggccttgggcaagtgggtttctttatccagaacttgctcctaggaggccccactgaaacagaaagaagagaagcaggagagactgcctcagcctgcctcatgagctccaggaagttgtttcctgtgtcttgcagggctacaaaataggcccccccaaacccaataaaataggggccccaaacccagccatggcccttggagcgtgcttggtgtatgtgagccagattctctgagttcttttcctccttctgagaacaactggtgagcacgctatcaccttaattttaatttctaccagactcacgtggaggccggctcctgcttggttttctggcggggaggtcaggtttcatctgtccggcaggaagcagcatggaatggaggtcttgaagttttcagtcagggctgctgactctgctgtctccctcaagtagctctagaaagaactcttaacaagcttacgacttccagatggggtctggagccatttcctgcccttctgactcccattagttttagctcagccctggaagaaatagtccctaatcggtagctgcagacatggcctctcaggtccagactgcctgggttttaagtcttgcctttggttggttctacagccttaggcaagtggccttttctagcttctctgttctcatcggtgtctagggtaggggcagaaattttagtttcaatttcagctcaatggtggagggttgactcttctagcctgttatcgttatcaggagtagagtggacgtccacctgctgactttgagtctcacgtaggtgtcaaaggaagggcccatctctgagatactttatggagctacttcacaggaggctgtgtgaagtataaggaggagtatggtatattccagaccgcagcacagccagcctcaggtctgttcttagtctcagagttgagtgtctgtgactcagctcccttggtgtcttcccctgcttggtgtaatgggtctgagcacatcctcagggtgacatgtgataccgatgggaggtggctagccacctgcctgtcttgcattgatctcctcagtgttgagtacacataccaactattctgtctcccaggcatgtctgcctgtgtaattgtatgagttttagcagtcaataggactccagtttctatattggagtgaaggattctgggttttgttgtttgtttgtttgtttgtcttgcttgcttgcttgcttgcttgttgaagtgtgaggaatgggacactgggccttgtgcatagaagtaatctagcacttcattgtagaactatgcacccaacccctctatgtggggtcttaggcaagctctctatcactgaaccttccagcccttttctggattctaggcaggtgttctaccactgaaccacaccccggcccaggcttatttgcatatcactttctttataccaagttctataaggcagaaaccctatttgacctcaaatgtagtgccacgtggggttcttgtaaagaaaacaagatttctattttctcttggttaagtgtccagtaaaccagatgcagggtatctctagctcccttgggcctgtgacactttctgtacacccggtttgttgctggctaggatcttccacctcaaagatgtgcacctaaaatggcataggctatagaagaaatggccagataaagcacacagggttgaaagcatcgcctctaatgcatctgctcatctcacactgtgacacaaagcttccctgaaggccctgtgtccagcattgccaaaccaggctaaggcatcccaccagggcacctccttctcactaagagaaactttatgccaagaagtcctcgtcctgattcccgcatcctttgggggtggagttggggggagcgtgggaaagtctgttgtttaacaaagaaaccagtcccgggtatctgggtttgcctaggcttccgaaccagatggaaatgatgggagcccaaaagagcacgggcctcttttctcctccatcccatcttccttctcctcacccacctcaaagagaaggtgactggcttgtgaagggctgcagtgaagaggcccaggctttgggggaatgtctgctcctgtgctctcaaggcaatgtttaaaataaattaggagcaaatagggaagctggatataggcaaggaaggggtgggttgggctgtggatggggagggaacgggcacacccatggagcagtatggggccactaaacacatagggagcttcggtttgctccttgtcagcacatgcagtctcttgtcccttctaaccatgcccttctgcatcctcagggtcatcctctctcttactcttgctctctctttctctctctctctttatgttttgaaacagggtctcactgtggagctatgcctggcccagagcttgctatgtagggcaggctggcagcacagagagttacctccccagtgctgatattaaaggcatgtgtcactgtgcctgactcatcttctctctcttgaaagctcagcctgacaacttgtgcaccgtggacctcttgatcgtttttggggtatttgcctcaccatcagagggagcatgttattccttttattgttgccaggacaataaagaccaaatggcagtttaaattaaatatgggcatgatgagagattgaggaatggagaacacgtgtgtatgtgtttatgcatggatatctgtgtatcagtgcagggcatgttagagtgtgtgtgcacatgtgtgtatgtgtgcatgtattcgtgtgtgcatgcatgcataagtgcatgtgtgtgtatgtgtgcatgtgtgaaccatacacacatgtgtgtatgtgtgtttgtgtgtatgtgtgcttgcgtgagtgtgtgtgcacgtgtgtccttgcatgtgtgtgtgtgtgtgtgtgtgtgtttaggtaaaaaggagatgagtcctaaccagtcttagttttctattgatttttctcctcctttactgcatgtatttccccttgaaggagaaacccagttcctggtttcatgtctgagctcactgtgcctcccaggggagaaactgtcccttgccttttccattacagattggaatgcatttgattgacagccctggaagaaggccaagctttcgcagaaaaaccccttttcacccctcccccattggggaacccctgtagacagacctggcttccagcccaatactccaagcagttgcttctgtaatttttatctttgccagggctcagagtactgtagatgagctagctcagttgtatacttagaagccctgggtttgctcctaggcttgagacctagcatacaagaagccttgggcttggcccccagcatttcatagaccaggcataggggatagctgcatacacacactaagaaggtagaggcaggacggtcagaagcttaaggttatttttagtctgccagagcttcatgatcttgtcccctaaacatatatacatagatgtaagcatacacacacgtatacatacctgtaagcacacacacatatacatacatgcaagcatacacacatacatacatgcaagcaagcatctgcacatatacacgcatgtaagctcacacatatacatacatgtgagcacacatattacataaatgcaagtatacacatattatatacatgcatgcaagcatgcacatttatacatacatgtgaacacacacatacatacatgcaaacatgcacacatgtatacatacaagtaaacatatgcgcacatatgtatatgcaagcatatacatacatatatacatacattcaagcacacacacacacacacacacacacatatgtatggcctgcagatgctaaaacaaccacaacaataaaccagttaaatgggggactttttgtcacccacccttcatggggaagactcacaaaggctgcagaggatgggcagagagaagggtctaatggtgttccgtggctcctgtacaattgtcaaatgtggaggttacgcttgtagggaggttgatggggagatcagtgggtgtcttctgaaaatgcaggtagagatgttggtaaaaatgcccttcactttaatgattcaaaatgcaagtgtgatatctggccaggcactgggctaagacttattacatagatcattgtccctatttttagatacttggtttgttttcaaggttttttccccctgttataagtagtacatagatgaatatcttttcttataattgtgtgatttacagcatcctgtttagagtcggttctttcaagcacaattactgggcgtggggtttaaaaagtaacaaaacgaaacttggcatgcatcgcaagcttgcttcagtgtgacattgagtccccgcgcaacagagcgcactgctgcctacttcccttcaaagacttagaaaagccagcccttggttgacactgagccatcagttagcgtatgactcagtgtcttgataatttaagctgtgctcattctagaccaacggttctcaaccttcctaatgctgtgaccctttaattcggttcttcagggtgtggtgaccaccaaccataaaaccacttttgttttgatttcatcactgtacgctcttctcttcatcccagctcctggaatgtggcccctcacgctgactgtgtctggaaggcccaggatctgggttcttctctttaaggagatgcccaggaatctagatgatttttgaggtttgactgcagggttctcctaaccttctaatcccctcccctcgaagcagatgacaccttctgtgctctcagccccctgccagcgcatcccaggcttggttgtcacctttgaaaggtgggagaacgaatgttcagacacgatgctgggtaaacaaagaagtttggaggggagctgctggctgtgtttttcctctggatgatgccgttccttcagcaaacctaatttaaaaccatgaaagcggctccacacaccccaacaagcatgtgtccagtgccttctctgagccaggtgcttcactccaaaacaaacaggccgtgtgatgcttgcctatgtgaccctcacacaccttctggaaggatgaagagacacactaaagaaaggactgtctcccttctgctgcagggactgctgagcttgggaccaaaagccacacagttaagggaggtcacagagaacaatggggctgaggaggtcaagcaacactggcaggtagaaacgtgaaggcagtcagggaatgggacatgtgagtgtttggggacagcaggttccagatggaaacaacaataagctcgagggccattagaatacagttggatttcccatcctagaaaggagaccagaggagaaggaagagaaggggtgacatgggactgtgggtgacagagggacctggtagccttgaatggcactataagaactcaggtatactggctggttttgtgagtcaacttgacacaagttagattcttcagagaagaaggagcctctgttgagaaaaatgcctctatgagatccagctggaaggcattttctcaattagtgatcaatgtgggatagtccagcttgttttgggtggagccatccctaggctgcaagaaagccatgggagcaagccagtaagcagcatccctccatggcctctgcatcagcgtctgcctccaggttctatcccagctgcaattcctgtcctggcttcctctaatgataatctacagatctggaaatgtaagctgagtaaaccctttcctccccaacttgtttctggtcatggtattttatcacagtaatagaaaccttgactaagacattggggttctacattacatggacttagtgttgacagcaaggaaggaaggggatgtgataccctgattgaagaggttgggcctgactctggcttaacagcagagatgacagaaagggactattggttcctgctaccaagtaggtgagataggcaatggtggctataaagtatgagaggtgtccattcaggacacactacagacctctcagtactttgtggagagctgtagctaggagtaggcatggcagccctctctagcatccttcccttcccagggagtagcgtttgggtaatattctactttctccttggaatcttgcctccaggtctcaatcacacttttcaacaacctctgcatccatcttagccatttttctgggactcttttttttcccaccatttaaaatggccccatatctttcttaccaaggtctttctttatgaggaaaggccattaatgtccaacccggcagtcaggactgctcaagaagcatctactgtttgtcctccatgccaagccttctgtgggacaggaacttatgtcacaaagccaggaaccacctgcaggggtgcccacactgaaaagccccaccaggaaacacaaaacactttcttttgcaggttgccttggtcatggtgttttgtcatagcataaaaaaataagacggggatgtttcccagggtgacatgaaccctgctcaggaaactggtgttcctgttgctgtcctgctagttggccaggtggtggctgggaacgtggataccttttgggactgtgttttcaacttggacatgagtcccagccagctaggtttctaagatgctgtcagctttaacatcttacaattctaagtgacgagtatgaataagaaataaggaacagaggtggcagatgaaacctccatgctcccttgggaggttcctgacagtggtggcccaggtctgaattccaagcagttcctgggtgcccgctgtccttcacattcatccatgtttgatatgaagtctgtacagctgagtgcagttggaaagatgagcaaacccaaggctgggataaaggaagcaagcctctataaaaggagactcattcccggtggttgtatgctctgcaaaggatgctagtctatctggccagtccccgtgtctgggttgctgtttcatatctgattggaaatgactgattaatgaggatggacaattgtcacacacatacacacacacacacacacaccagctttgctgcctccagctcctgcctctaactttgggtccactccttattttctcaactgttccctccaggggctttgatgtataaggtttaatggagtaggaaaatggctagcttccagaatgacaaccttagtccggtctggggctgaagccaggtcagataagcccgatacctttcatcttatctgcaagttaacaccttcctccctggttactgcaagaggggagacccaaggaattcagcttagggtttctttctcttctcacttagctttggcttcttactatgactaataaatattgctgggaaatccttccatgttttaaagggacagtgttttccacaatgtctccctaccaaagtaagtgtgtgtgtgtgtgtgtgtgtgtgtgtgtgtgtgtgtgtgtgtgtatccacacttgtgctctacacagagtcacgttattctctttgagcttaatctcttcctagcaggctctgaatccagatgtctattattgtttgaacagtgatgtgagcactaaggttaccatttatgctgtggctgaaaggactgtcttccggtcattgttttcctgctgcgattatgacgagtgtccctggctttgttcctgtttggagcctgatattatcctgggtctttgtgtggcaggtgtgtgaagcagaaagtccccaccaccttcagttctgctgtctgtacagatagcaccattgcacttggtgaaaggcggtagtatcttgagggttttgtcctcggagctgagttcagtcaattgaaccattgagcggatgtcatattctttaagaaaaaaatttccctgactcagccattggaagtgagttacaaatctccaagtctgggatactagagacctctccagtaccatagtcccctcaactccaagacccccaggatctatacttttagttatttgcaaaatattacatggaaaaaatcccaggaataaacaaacaatccatgtcttaaattgtatgccattctgagcaatgtaatgaaatctcatattatctcattctgtactactctggatgtgacatgtccctctgtcctgtctcctcaccttgtatgatacttaatgtatgaattaagctttgtcatagatacgatgcatgagcataggaagagaggagagcatgtataagggttgttgctattctagtctcaggaagccactgggggtgttgagatgggctccctgccgcagataaggggctcagtgggtgaaaggcggggcaaacaggatgccagggaggggtccagtttttcatagtgagagattacagatggagggaaggacttgcttcaagaggacatgagaaatttttattttatttattttttgtttttcaacacacggggtttctctatgtcactctgtctatcctggagcgcagtctgtaaaccaggctcgcctcagactcagagatctgcctgcctttgctcctgtaaccccaccagtactgggattaagggagtgagctaccccacccaggtgtgagtgtgcatgtgtgcgtgcacgcgagtagcccctagaagtactttcaggatgcttatccagactggggaatgggctagactgttctgaagtggcagtcttggagtgggagataaaagcctgcctgaagagcatctggtatgagcaagctcttatctcctttaagaacagatgaggttgctttgacaactgcacagcagagggaaaacatcaacctggtctctatgtgacttgcaggagcctggccatcacatgcagttcctactgccctctttctggcaggcatctttgtgctatactgtacctggggggcgggggggggggcaccgctcctattatcctgtgcagaagaacaggactacaccaagctctgcaaatgagcctggtttgcttggtaaatcctccctcccccgagggtttgtgtcatatctgtcgggcggttctttgcctttctgtgcttgttttgtacacaaggcttgtctgatggcagcccaggcttgtctgatggccctggagctggtagtgggtgcatccttggagagggaaggatcagtgcttgcttctgtaggggtctctccctgtttcgataaggaataccctctcttttctggcagtatcattcacggcttaccttactggaggagagtaaaggaatgaaccacacccagtgggggagccttctttatcctgctggagccaaatagccctgaaggcattatccttcagcagggatttttattgggttttcttaggtcagaccttgtcttttgattaccctagaatggggaccatatgttcagtgcttgtcatcatgggtgcctgctcaggctgtgctcagtgctatggtggcaagagagagaactacaggcaagtgacagccagttggtacctagtccagggtgactgtccctgggcagatatttaagatagacggctcccctctctttcttcctgctccctaagaaaacacaaagggtcggaccactgtgggcaggtactccatcaaatactgtagctagcaatttttttaaaaaaggagaggaatatcaggcatggaaagtgtatgaatcgtggatgcagacgtttgagatgtgttggtgatgctcagtatagtggcagaaatacacgttcagctgtcagcctggctttatgcgatggtctgggagagctgctttcccagggtgggtacttttggacttctcaggaacataatgaatgccactgagaccactcacccctgaacagtgccgagcaaacatggccatgttgatcatccttgtatacctacatagtcctcaaaagcggacagaactctcaatggcttctcagatccgggtctgatgatatgtttgttcaaaggagccatacacacacacacacacacacacacacacacacacgctgtaaacagcgtgcgtcttgagattaccatatggcctctgtagttgaagcttcacccaagtctctcataggtaatgagagcttcactggtgccagctatagagaggcttagcccaaacccgttggtaagaaggatgtattgagctgcccttcttccacactggtacctggctcctcttgtagactcagataatactctcgtaaggccagaggtcctggaagagtgaatctttctgatggtcatgtgactacatcggagtgaaaatgaccaccacatgtccactggtcagcacagaaaggaggcaggctcagccaccactggtggatcctatcagggttagagttggctccttgacccgggacctcctcctgtttgtcattgctctgggaagcagtaacaagatgtgggctacatataccgggctgttcatggtgtcatggattcttctagaaagaacttcaggcttcgccatgcagttgggtcagggttccttgtgatgctgaaagacatcccactatgtccttgactctctgctttgctgacacagccagtggacatgggaacattgtagggaagaataagtcagggaaggcggggaaggcttacgttctcagggccaaggttaggaatgggtctctgccctgaattccttctccttcctctttagcttctcttctcccatccaaattgactaagtctaccctggtccatccccggagtctcatgagccattctctacttctttcctgccaggctatgggagtgcttggtgctgtttctttgtgattgttgttgtaaggatttcccaactattagagagacaggcttccctgaaaaagtcagataagccattcaagcgcagagggtgagccccacatcattagagcagagcattgcaccattatgatccagattctgacatggcttgcgacatttatctgaagttcaggcatcttgctagagacgccaaggaaaatattttcaaatcactggggcctggggcttcgtttctccctttaccagcctgtctgatgacctcagctggctgtgacctttaccccgccactttcagaattttgccagttcacaaaaaagctttagacttttaagtcttggggaggatttggagggtgggggtgggggttggggggacatgacatgttgttcagccttttgacaagtgtgtcgggacacattcagagctatcctgggatccactggttggaatgtctacctctgcacggtttcagaaatcctgcagattcttctgctggcttcttacttccccaggttccaatgacagactttattaaagagaaaaaaatattatcttccctttaaaactgcttctgcctgtaaatctttccatcttcctaggggtcatggaggtagaagcactggaattccagtttaaaaaaacctaatgctgagaccttgattaggtgatgggatctggggactatgaactttctccttcaaatttgcttgcattgcttaattaaaagagagggtagaaaaaaaaaaacaaatgtgtcatttctttaaaaacaaacaaggttccaagataaatgaatttagaagcaaacagtggcctgaggttccctttaccagggaagagtcctgagagcagtcagccacaaagtctctgaggatggaggcctgagggcttcgctgggcctgtgagtattagatcttttgtttgcttctggttggatttttatctcgacccactagcctactttcctttgaggactgagtggctctccccgctcctttccagagcaattctccctgtcaggccacctgggcaggtccttacaggctaacacaaatatttagaggctaaccgcttcgacagaaaaaaaaacaaacaaaagacactttctgttagaaattaacttcggtttttgagagcaaatgtattcccttatctacccttgacacttataggggtgaaccaggggagtctttggcctccccacccaagctaaagcacaggttatgttgtgaagcaaatttaattagttcaaacaaaacaattagaactgggtcccgccctcagctggaagggacattgacctctgcccgccacagcctggcccaaggttgcatgcagttgtgccctgatcaggaagctatttctggagctggggagagaacctgtcatttcattccgtgctttccacgtgggggacaaatgccacttgacagggctgcaggccactctcttctgccgtgtttagtggggaagggaccagttctcacatacctttggcagcttcagagatttttttctgggagccaagccaagcattcctatcctttgggaactggcccaagagtagaaactctatgaacttctactcctgggttgagcaatctccaaaagtcagttgtgtgagcttggggagagagaggaacaggaagatctagagccaaccccggcctattccatcaccagctaccttaaacaaagggcttgtgtttgcaattctctgccaatgaaacccagtggctcagacaaaggcatccaacagagtcctgttgtaataatagctcatcctcttcatccacttgatctcggttcccttctgtgtttgctagaacttcagagatggtcaggaggtagcattcatatgaagaactcagtcttggctctgaaggtttggatgctaagataagctctggttgtcttggtcattttaactgggtacctcaaaggcagcccaaagagacatcaaaaaagggctttggttttaacatgaacctttattctaaatgccggagtgggtccagtcaaggagtactgctctcatgggagccctgaagtaggagggagtagagagagttgagggaatgaaggaggccatgaggttgatacagtctcagcagctaaggcgttaggatgggtaagactcttcattaggaatggaggacaagagctagatgctagctgtaggggggaagccaaagggtgtcatctatttcaagagggtcatttttttctcttcaggagacagaatccaaggatacaattccagtgcccatgatccagacccatctcttgcatgttgtagtccctcagtaagagtgtgacaggcagctccatagtgcctgtgatcaggattctgtcttgtttccccgcctccctagtgtgtggcctgccttctgtggctcagtaccttacccttggtggaatttataacaggaaaaggggagatgcagtgttgccccataggacatttccatgttacccttgtcacgtgaacttagacccatgctcattcttatttattgcaagggcaagtgggaaatgtagttcatattttttggcagctgaaaatgagcagatttgttattggagaagggagtgggttatgggggtggggatagccagggtggtagggagaggggtgtctcatcattgatccccacgttctgtagtgagacctaaaacggggcagccaactgcaacagatctgtcatcgaggtcttttctgtcaccaacatcaatacattttcttcaacctcagtttcagctatttctggtatttcccccttttcagggcagctgaacttggaagagggcagtcagtaaacattgttatgcctttgtattcaacatcaaataaggatagaaaaaaatattcctaggagtgagaatttaaaacaaagatcctctcccatctccctctgccctctcctcttcccttgccgcccgcataggttaggactggagctctatagtccttggaggcacgagggtactcttctagagccctgttctgtgcatgtagaagccttaagggctttggagaagacaggggccaggggagaagagcagatgccatgagcccttacataaggaggtaaatcagcgcatgggtggttcattttccattagctagagaggcattttatttccactagaaatggaggcagacaggaaagcaattagtgttagtgggtttatagtgcggtccctggagccagcaaaatccaagcaccagatgtctgtgcgagaacattcgggggttctttccacccctgcccatccccacctcctgccaaaaagacccaaaatatcacagttgggagaacagagtatgccgggaatagcagagcaggaggcctgttctgtggagatagagaacgctgccccagaagctgaggataggaggactggaggatgggaagcaggctgcccagtcctcccaaactcctggccccaggacccttcagtactctgaagactggggcttaaagtgcagctagcctgggaatggtgggcttgaagctctattatctaccttcttttgtctttgcccttgtcccctgcactctggttattcagagactaggaatgagagaaggaggaacccctgcatggacaaaagccccaacacctctcttccttccccaccttctaggatagcaagataatggtaatcttggttgccacagagatgacatgtgaacagcttctggtgtgctgttcttcttcctgtatcaccctatctcccccttcaaggtcacgtagcacaagcctgtgcctcgtctgggctgtcctgtctgggagccacttgctactgagccctagagtggtccaccctctcaagtgcagtaagtgtaagcgagggatggtttgaataacacatgtggaactcaaatgtttctatggctacatgctcataaaaattggggatatactggcttaaagatggcgtattatcaaatgaaatctgtttggcgaccctttggggctcaggaaattaaaggtcttgtttggtcactgcaagaaagcgaagcaagattgaggccgacatattttagatgccagtgccctgatgacaagaattttaaaagccttcttctacactgccttactgggtccttacagatgcccctgtgaaagatgggaggcttgggcaagtccctctgtcttgctggctgtctggctgtgatttctctccattccaagaagggggtgaacttacatgtttaccgacctgatgactttgtgactgcctgggtagaaggcagggataacttgctggggtggcacacacctgtaaccccagcatttggaaaactgagtcaggacggcacctttgaggtcagtctgggcttcatagcctggggtccccatcctccagccccaaaagaaaatgttgtacccagaagacattccccacccggggacccccttggctggtttatagagtatctcacaaagccctctccggtgcattaaatggtagtcagtgtttctaactctgtgggaatttattccaaatttcatttagaattagattttggcttccaactattttgtttcacctcctgaaatttaattttttttaatgaaaatatggggcctagagagatgggcctgagtcccagtaggtagccaaatggatttcttttgataatactctgtctttaaacaagtatatctccaattttttatgaaccgtaattatataaacatttgagatctatgtgtgtgtcattcaaaccatcccttggagagctggtgtatattttacacttattgcacgcgtgaaggcggaccactcagctgcctactcttccagaagagcaggggtcagttctgagcatccacatggccactcacaactattcataactccacttccagagtagccaatgccctgttctggcttctgtgggcactgcacacatggtccaccgacatacatacaagctaaacactcctaaaataaaagtagatctttaaaaagtgtgaaaaattcaaacattttgctatgttttctctgtagctttttgatttctccctctgtcccctcaaatgagtttcagtttccagccatcaccatgattctagaattatggatattttatcatcctccccaaataaaaccctataccaagtatcaattactttctcagatcccctctactgaaagcctaggaaaaccctaatttctttctgtttctatgggtttgctgactctggagaattgaattcacatacgtgaaatcataccacatgtgggtttgcgagtgtgttgggcttcgtccacgtcataacatttccaaaacgtatctgcgctgtagcgaacatcagaacttcattgctttctgtggccgactgcattctagtgtgtagataaactctgttttgtttatacattccctggctgataggcatgggggttgtttcaaagctggctctgaggaatacggtggctgtgaacacttgtgcaaaaaaaaatgtgtgttagagaacaaccttaggctcttttggatagataccctgggatgccattagtgggttatagagtctcaggatgggtaacttctggagagacgccaggttgttttcaaaagcaagcacaccactatccggtcctgccatgccaacacttgctgctttctggtttggggatttgttttgggttttggtggtggttgttttggtcctcatagtcaatgtaagttgatatctcattgtctttagatttccattccccgaatgactagttggggaacctctttttgcaaatgtattggttattttcaggcatttcttggagatgtctacttgggccctttgctcaattaattgttgaactgtaaatggatttatatattatggacacttgtttctgtttcagatatatgatttgcaaatattttctcccattgctttatgttttcttgacgatgtccttcaaagtacaaactgtctgcgttgaagaagtccagtttcccttctctttcttctccttctttccttccttcctttcttccttccaatatttgttcctttgtatttactgtcatatctaaaaagggctttctttcccccatggtctcagtgtttgctactgtggttttctccaagagtttgaagcatcaactttagtatagagcttgttgatcaattccaagtactttctgcatatgacgtaaggaagggcccagggtccttcctctgcatatggctattgagttttactggcactgtatattgagaatgctatttttttttcttctgagttttcttggcagccttatttaaaaagtcagagatgagtactgtagagttggctcagtgggtaaaggctcctgccaatgagcctgatgtcctgagttgtctccccagaccaaacatggtggaaagagagaaccaactcccactggctttccctccctggcctttacacacacacacacacacacacactggcttgtgcttacccacattcatatacacacaaaacaaataaaatgaaaaacaaaaggaacacaaaagccaggatttgcgtatacattcataaacccagttctccatagtgggtcttctcttcatctttgtgcatgtgctacaccagctgtgcacatgcattttttgtagtaagctataaaacaacaaaacacaggttttcttcctttattctctgtcaagatttctttttctttttttttttttttgctattccatgccttttaaaaaatcttcatatgaattttagaaccattttaatcaatttctgcataaagtcaattagcagggaggcactgcagtgaatctatggaccagcttggggaatgctaccatgtaacattgctttctgacccatcgacacaggacaccattctagttatttattgtgcattccaatatgcactagtaatttctttcgacaaagtcttttggttttcagcataaagcccttgttctctttccttcactttcctcactcactcactacacagttcaatttccattcctgtgattaactctgaagatgtagtgtttgtatgaccatttccccctagcccctaccccgtcaggatctaccttagcccacaccttatactccagaacaacactgttcaatttgcctctattttctagtagtcttcccccccacccccctttgtcatgctttgagtgattaaatacccattatttgggcatagtgggctcgtgtgctcacacagtacacgaatggccactgcagtctgatgatctctgctcgttgcctctttcatttcacaggaagaagctcaacacatgggattagtttctcccctagtacttggccactcaagtgggtggtgctatgattgacaagccaccacgtcaacgcctgctggggaacacataatcctcactgaaggcgctgggcagagtcctatcgtctccccttcacccccagcgcttgagagtcaatgagggattgttgtagagaactggagagagactgcaatcatctcatgttctttaacagggtgctcacagggtgccattagatccggacagcccacccaccctatcctatggaagagatgttcattaaggatctctctgtgttcatgctttttctgtttcctctaactccagatattgcccttcccagagcctccaagactctttcctttattgaaaactttgatctgaaagagagatgctagtctgtggttagggagaaagcagggctcagaaacagaatcctgaaggcttggcttcctacttttttattgtgacttttcttctttgtgtgtccctttgatcactgcctgatgagggttaatcctaagctatgttgtatctgcaggccatctaaatgtttcatcatccagtatggtagagctctaccccaccagagctgcagaagggtttggagtcaactttgcaatgaatggactgtggagaatggagaagggcctcctggatgtggggagagtcatctgtttgagggcagtggcaatttctccattgataagcacatattttatttaatttgttttcccatctctggtgactaccaccgtgagctgcctgagcttgcccagtgtgtatgtgagctcatgtctgttccctaaaatctccactctcctagtggatcaggaggccagggtgctttttttctctctctctctctctttaaaaggaaagtgggtgcgggtgtctgcatgcaactgtgtgaggttagtgtatgagtgtagctcctgggaaggccagaagagggcatcagatgccccagaactggcgttacagtcagttgtaagctgcctgatgtgggtgctggagactgaactgtatcctctacaatagcagtgttcactcttaactgccaagccatctctccagtcccaagggctgttcctttagaaacggtcagtatttccatgattccatagatgggaactcagctcctcaggaacaagtagccatttggaagatagggaatagtgaaagctcccatattgacctctctgaaagagcagctgtcaaggatagcagccagcccctccctgctttcttatgcctatgtacatttatgcctttgagccgtctggggtacatttttgcatgtgatgcgaggaagggggtcccacttcattcattgcatgtatgcatctacattttggagagttattcttgtcccattgggttgtcctggtacccttgttgctaaagagatggctcagaaattgagtgcttgctgtgcaaatatgaggaccagattccagatcctaacacccaatagcaagctgggcatgcctcaagcaagcctgtaacccctgcactgagatgagcagacagagctagggcccagtgacttccagcctagagaagacaacacaaaagctttaggttccaggagagaccctgcctcaaaggactaaggatgaaagcgatagatgatgcttgatgtcctcctctagtcccatgagcaggtgtgggcacacacaggttcacacagctccaggtgtgttcacacacagcatgcacctataccacactcacacagagacataatacatgcacgatcatacacacaccaccctcaaacacatatacatgtacacacacatatgtatgtatgtatatattacacagacatatcacccacacatgtggatgttaccacactcagacatatacatgcacagtcacacatcattacaaacacaccatactacactcaaatacaaacctacacagacatacacagacatacacaaacatacacaccacactatatagtatatattatgctcttgcatacatatgtacacacacatgtcttatatatataccttacttcgctgaggtgaattggagagaataaatacatccattacacacatacacacacacacacacacacacacatatgtttttttgagacagggtttctgcataaccctggctatcctggctatcctgaaactagttctgtagatcatactagctcctgcctcccaagtgctgagattaaaggcatgcaccaccaccacccagttaaaatgtatttcttgatgaagtttgagaaaaacagatacacagctatgcagcactacaccagtctgatggtatggactctttctagcattttgggtgtcctgccatgaattctcaccgtcctagctccaacgccagcctgggcaggtagtggtgtctatgctttctcttgtgatagctcgcttctgtcatttttcagttgtctgtcagcagaggggactcctttgcttcttctcacgtggtgtaacactttagtgcacccccacccctcccatctcagtagtttatgtgttatttctgaagtcaagtctgttttgtgggtcacagttgcttatctatccagctgttgatagatgttgagctgttttcagtttggggcgaccgtaactgcaactgcggtgaatgcatttgggttgtgtgcattcatcactgttggagaattcccaggagtgaaatcgttgagctttcaggtagatacttggtattcctggtggcaactgtgtttagttttcaaagtggttgtgcagctagccagtctatctatcctctatctgtctgtctgtctcactttttctctatttgcgtgcatatgttcatgtgtgtacattgttcacgtatgtgtgctgttcgtgtatgtggagacctgaggtgatatcaggtgtctttgttcatcagctctcaccttattctgttgagttagagcttcccactgaacctggagttcaccgattttggctgttcgagctagctcgctggagggacctcctgtctccatacccagtgctgagataatgggtggctacaatacctacccagctttttatgtgggttctggggcctgaactctagtccttaggcttgtatggcaagctgagtcatttccacagcccctactttattttttttaacttttttttcttttttcctttttctcttttcttttttcttttttctttttctttttcttttcttttcttttcttttctttctttcctttttttttttttttttttttgagacagggtttctctgtgtagccctggctgtactggaactcactctgtagaccaggctggcctcgaactcagaaatccacctgcttctgcctcccaagtgctgggattaaaggcgtgtgccaccactgcccagcaacttttttattttttaaaagcaggggtcacactgtatcctacctgatgtgatattcactaaatagcccaggctagccttccatcttcacagaaattcttctaccccggggttctggaatgctgggattacagatgtataaccactacacctggctagcacatctcttccaaatgtgcagggctcctggggctagctcttctgctgtatactgggaataaagaggtgtgggcccagcttcagtcatggtggcttagtcagagaaacaaccctgtgtctctggatgtcacttccggtcctatctgggcattactctttgtgacaaccagtgagtgtatgtgtgtgtgtgtgtgtgtgtgtgtgtgtgtgtgtgtatgtgagtgtgtgtgtatgtatgtttgtgtatgtgagtgtgtgtgtgtgtgtatgtgtnnnnnnnnnnnnnnnnnnnnnnnnnnnnnnnnnnnnnnnnnnnnnnnnnnnnnnnnnnnnnnnnnnnnnnnnnnnnnnnnnnnnnnnnnnnnnnnnnnnnnnnnnnnnnnnnnnnnnnnnnnnnnnnnnnnnnnnnnnnnnnnnnnnnnnnnnnnnnnnnnnnnnnnnnnnnnnnnnnnnnnnnnnnnnnnnnnnnnnnnnnnnnnnnnnnnnnnnnnnnnnnnnnnnnnnnnnnnnnnnnnnnnnnnnnnnnnnnnnnnnnnnnnnnnnnnnnnnnnnnnnnnnnnnnnnnnnnnnnnnnnnnnnnnnnnnnnnnnnnnnnnnnnnnnnnnnnnnnnnnnnnnnnnnnnnnnnnnnnnnnnnnnnnnnnnnnnnnnnnnnnnnnnnnnnnnnnnnnnnnnnnnnnnnnnnnnnnnnnnnnnnnnnnnnnnnnnnnnnnnnnnnnnnnnnnnnnnnnnnnnnnnnnnnnnnnnnnnnnnnnnnnnnnnnnnnnnnnnnnnnnnnnnnnnnnnnnnnnnnnnnnnnnnnnnnnnnnnnnnnnnnnnnnnnnnnnnnnnnnnnnnnnnnnnnnnnnnnnnnnnnnnnnnnnnnnnnnnnnnnnnnnnnnnnnnnnnnnnnnnnnnnnnnnnnnnnnnnnnnnnttttataaatacacattccaggccgggcagctgtggcacacacctttaatcccagcactcgggaggcagaggcaggtggatttctgagttcaaggccagcctggtctacagcgtgagttccaggacagccagggctatacagagaaaccctgtcttaaaaataaataaacaaacaaataaataaaaataaatacgcattccaataataactctagttaagattaggacaagttcgtagctagacgtggtgatggggatttgtaatcccagttacctgggattgggcccagttaacctgggaggctgaggcaggaacattgctcagagttccaggccagcttgggctacagtgtgagaccttgtctcaaaaacaaaccaaacaaacgatcaaaatgttaatatgtcaaagggataaaattgaaaagaaggccccatgtagacttccaggtactttcctgattcgtacctagccaggccaggcttaaaggggaagtgagtcttgtgggagatccaacataggtttttatttcagggtacttagggttctctgctctagggagtacagtaaagtggacatgaccatagagcaagtcacatagtgtttgttgttgtttcccagtgcttagacacattccatgcatagtctattgcagtctgttaagcaatagcctaataccattacaagatgaacacactgggggagagagctctgtcaatgaagtcttctaggctgtacaagcgtgaggacctgaattcaacccctaacacctgcataaaaaaaccatacgtggtgatatgatggggttgcaatccatggagaggaagtgaagaccggggagtctctggagtttgttggccagtcaggctaattagtgagcccgttactagggagagatcctgttttagatagatagatagatagatagatagatagatagatagatagataggtcaggggggaaagagggaagaagggacagaggaaaggaggggacagcttctgaggaatgacacctgaggttagttggcctctggccacagcaagcacacaccctgacatggacatggacagaccctgttgggtgcagatgcacacatgcacacacaaagaaaagaagacagcattattggcagaattttaaaaaaaaagttcatgccttaacttgaaagtattttgttgctcagagaaagagagtgagtgtgtgtgtttagcactggagaaatagctcagcaggttaatggcactttgccaccaagtgttatgatttgagtttgattcctggcacacaggtacacaggtgatggaaggatacaaactatttcccttcaggtgtcctctgacctctatacatgctatggcatgcatgcatacagacacaggtacacacacacagtaaatataaatttttaaaaatatgactctcctggccatgtgacatattggggaaattccatgcatttggccaacaagttgccgcaaaccttatagaaaccacagcatctgtgaacgagtcacgtccgcacttgatcccacttggtgctcagaagagctctgcgaggccagagtcccaattctccttttataggaggaaacagggccgagcaaactgccctgggaacagcacggagtagccgagcctgcggataaacctggctcgcaccccagcctctgtgctctgtaagtccagctgctttttattttcttctgcactcttgttaaggacagagcgaagggacgtgtccttcggaggactgagcacggctgagggtatgacgtagattcagacacttctttttaaaacttaatgcaggggctgaggggataatacagtcactgaaggggttgtgcaagcataaagacctgagttcaaagccagtacccacataaagagccaggcgccttagtgtgggcctctgattctagggtcaggcacgcagagagagggttccctatggcctgctgtccagccaatctagtctagttggtgagctccaggttcaattgaaagatcctgtctcagaaaataagatggtgcgactaagaggtgattcaatggttaagagcgcttacttactggtcaatggtaaggaccagagttaggataccagcagctgtgtatcaagctggtcattccaccaaggcctgtgtactccagttctgagggatccagctgtcctcctctgacctctatgtatgcatgttgtatctgcacatagaagtaaataaatcataaagactgaaaatatgggcctgtgaggtggctcagtgcttaagggtgcctgcagccaattctgacaacctgagttcgatccccagcagccacatagtggggaggttgttctctgacctctacacgtttgctgcagtgtatgctcaccacctccctgtaaatacataagtggaataaaaggatgagatggagagtaaggaagatgcctgacatcagcctctaatctctgcatatacttctgcacacacatcttcacacatgcagacacatacctatacaaaaaaaaaaaaaaaaaaaaaggtcaacgcaaatttcattattcaggaggctgcggcaggagaattgctgtgagtttgcggttggtctaagttacatattagggcctgtctcacaccaccacattctgagaataaaactaatacaacacaggggtggcatcacaaacctgtaatcctagcgattaggaggctgaggcagggggattagactttaaggcagggctgcatagcgggttccaggacaacctgagcaatgtaatgggatcttgtctcaaaagcccaacagtaaaaaaaactaatgcagagtttggatctacttccaaactcttgttcttttcatctaaaacacttattaccttaaaaacaaaacaaaagattaaaaaaaaaaaaccaaaaacccagctctcctctgtccccaacctcaagtcaaagggcactctggagagtgccggatggacaggcgtcctttctgctgcacccttactgcaggtcaccattaccatttcacgagtcctgagcctttgctggcctttggccaaatgtgtttcctgttcccattctgccctcctagtttggcttggtttctagctaggaagcagatggggcagatgtttacccaccagttggtaccagtgcctcgggctctccccacagctgtctctccattttatgatttgctatggcccccaagcctttcaggatatagccaagggctggaagtgaaagaagagacaagaagccacctgggaagttcagggtagcttctcacagcagccactgtcctcagaaggaggagccatggtcctgaagcctgttgtcccttgtccctttgagggagatgctcaatggatctgctccttccccttttcatccactagtctaagtgccctaacagtcccagaggtaagctgtctaagtccagcgtactaacagaaccgggctctctctgggaacttctagcagctgcccatacatcctggctggtgacctctgtgtgagctcatccagcctcttactctgcagcctgtgctcacacatactgaactctctcacccgcttcttagggaaaacaccagtgattacagtgggccagctggctaatctgagctcatcactttctcagtaacctttggcttactggagcatcagtaaagtccccttttgtccctcatacaaggggacattcacaggttctggggattacgatattgacactttaaaacctgcaactacctcaagactgtagggacaaaaaagaagctgttggctcctgtgtgaagggttgttataataagccgtcagaaaagacaggagacacaggaatgtgttacgtacatggagcggtggcgaatgttaattatttttatcccaaagtcacttggaaacctacacaccccttttcttcagggagggaagagaatgagaaatgtcagcaacctttaggacaaccacgttagtaagtggtatttaggggagcccagtggacttgtagaatatttatcgacctgagagagagagactgtgttgggcctgcagaagaaaaaccgatttgcaaataattttctataaagccagacaagaatagtatgtggcagaagttggtcttctctgtctgtctgctgatgggtccaggcctctgtggtcaccttgagtaagaagcctctggccattgcttcctcttttggtggttcctgtcgcttggcagacaaggaacctggaagaaagcagattcctggggggtggggggaccaagggaagatgggaaggctttggactctgaggtagctcgtgaagtctctcagtgtgccagccctcctgtctgtgaggtatcttttgctcccaatctttggcaccatctcctgggaacaggtccccatccctgagggtgatgctgctatgtaattaccctcctccaccccattgctcaggcccaagttccgattctgacctggttgctggtattgggtctgtgaggtgacacaggcggaatgcatgacctctgaactcagttttttcctccataaaaaatggaggtagtaacctaaccgcagagacaatcagagaagcaacgtttggtgcagtggctggcagacagtgctcaatggatagcagctacagccatttcctcctcccttcggtttgtacttggacaggacatttaagtggaggaagtttctttggtgggaaggaaggcgaaggaggttcacgaggtctccaaccccggcactccaaactccttagctcaagggaaagggggctggcatttgtcaccagccttaggttaagttatctttgtgaatcaggatgctactatccacgcttgtcactgaggaggaaaccagaaacggaagccgcttgcttcttcatctgccttcccagagccaagagcggcttctctaatacctgaatgtcagactgatccaccaatctcttgttatgttacagaaagggaaaaatgagataattggagaaaatttatctgcttagggagacagagctatagaagatggtctgagagagatggggtggtgggaggggtgggggtgtaggggtggggtgacggtaggggtacgggggatgaggtgggaggatgatcgactgactctgggaaagaacaggactaattttgtcacagttaaagacaatatttcatcatgtctcatgggccaattctgcggggtccatatctggatagataagctcgaatctcactacctcgtcaactacttaattttgcagtcccgttgtctactaagattggtcagttggggtaaggaccgtgagtctttaggaattaggttcaaaagttgtataagacatcatatgtcatggagatcaggttccatgtagtcagggtctgattgctaaagtgagggcctttctgcccttaacgttgcctccgtttgtctctacggcagggctgtaacaattaatcagggggttattggctctccactgcagacccagtgcttcctggttgaggactgtgctgaaggccatgcctgtcatcctgatggatatgtccttttcctgtttattccattttggtaattccttctgaaagcgtaggccttatcttggtccattttgcgttgctacaacacagtacccggagctggacagtgtgtatggtttggctttatgggatggagcccagtcactgggatgtgtattcttcagggcgatagtgggatagaccccagacccttccccttcctgatgcttttggttcccagctgtgaggttggcagcttgacctctcctgttcctgctgccatgtgccacactggctcagagaaggggagcagttgattgtgagctgaaaccttcaagacagagtcaacgcaaacctttctctttacaagtcactcccctcagctctttgttatggaaacagaaagctgctagcgagggaggagcaagcatggcggtgcagttatagatggtttgcttttattcttctctggtagtgcttctgtgtttgacctgtgttctttaagattttgtttgctgtattttggtgggagaggctgagactcagtttcatgtagcccaggctggccttggactccccttgtagctgaggatgaccttcaactcctgatccgcattgttctttaggatttaggttctagaagtgggggtggagtgggaggggcattgggttacctttgtctcgctttgttttgccgacagcacacctcgcctgcagccccgtgtttaatacttgtggggtttagccttcacgcaacaagcacacagctattcagtgaactagttggatgatgtgggcagttctcacaaaaccaccggtgtgggggtggggtggggaagcataacaattcttctctaagctcaagtgcgggggtggggggaggggnnnnnnnnnnnnnnnnnnnnggataagagtcttctgtagacctcaggttcttaacttcctaaccccagctgcaaggggttgaaggaagatacggtggactttaaggaagttgcctgccaccaccactttccagctgtgaaggctagtcctggaggatgtactaaaggggggtggggagagggcgacagcagggggaggggcgggagttgctgggaggggcaaagcagtttccagtggcactgttagcttgctgatcttctttacctttcgttaaggtgagagcgcacgggagcaggtgcctgtgtagaatttctcttgcctgtgttatcttgagattaacacttgcctgacattagaccctcaaccttgcatccaacacactcaccttctcggctctccccgggcattgggttgcagcagttgctaagcaaccaggttatctgtagcagtttctggttggtcagcagatgcagaaggcggaccaataccacagttcctatcggagacttccagccctgagataccccagggatggaatttgaactctgctgcctctaagcaaatctgacctccatatcctaggagatccttcttcctggagctgggggtctgccttttgagactgggagaaataacatggagttataaaatgatagattcaaacttcaactacgtgggccaagaagtttactaattctagaggagtttaagatgatttataacaaaactctccatcttcctttgtagataaatctgcacaaaacatggttgactattttactttacaccagagagttcaggaaactatttattgtgggggtcgggaaggtattaaccccatcagactcccacctcaggggtcctaagaggtagatagccattgtttttcttcttttttttacatctcactggaactacactcatctctaaggtctcttcagagccaatttcagccttttattataaattaccaggaagtactatagagcctctgtgaaactcgggcatgatggtagaggttaactggtattggccagtataaagcgacctcccttctagggaatgttttgctacggctggggtgtttagccagtgctggagcagtggccttctcacgccagtcactgtcatggagtccagtacacatcgaatattacatttctctccaaatgttataatacagtcctgtgacactcaggtggggataagttcctataattgcattgtttggtgattttgtcatttttcaaagatcaaagaattggtgaacccacacaagccgaggaagtccaggtcagtctctcaatggtgtgatcaggaaatatgggggtaggaggggttagtgagaggaaggtgagtggagggtacccttcccacctccccaactgtggatcagagtgaaccaagccagtgcttcttcacctaactgtctgtatccagcacatctttgggaatatcgttggtctaagacaggagccatgttcccacaggctttgcctaagcccttggcaagtccaatgagagactggctttccagcatccccaggctgccttttcccaggactgtgtctctgcagagcctcataccagtgagtccttccatggaggcaggactagagcaggagagagactactacagccctgttgggactctgttcccagggatggggccattcactttctctatccctgcttctttttaaggggctcacggtatcatagggatggaaaagtattaaaatgtcaggcgaggcatggtggggtgtgcctttactcccagcactccagaggcagaagcagggagatctttggagttctaggccagcttagtctacatagtgagttccaagacagccaggactatgtaaaaaaaaaggggggggctgtctcaaaacaaacaaacaaacaaacaaaccaaccaatgacattctagagccagcaagatggctgacaccaagtttgaggagctaagttccatatctagaacctacctggtagaaggatagaaccagtccccgaaagtgtcctctgactttcctatgtgtgctatggcatgcatgcatgtatgcatgcacgcacacacatacagttttaaaagtgtatccctcccctacttccacatctgcaggtagggtcctccccacctgacaccattgtgaggaccacgggctgttctagctctgaaggaagtcgcagtggccatgtaagcccaggcccatcagcttttagggacgtcttatgccacactaaaagcagtctgccttgcttgcaaatttttgcaaagaaaacaaccaaccaggcatctctctagccagtgagggggcagtgctatccatctctcttctccagtgaacagtgcctcaactctgaatgattaggcttgccaaaccttcacctcaggtggaaaactaagtgctgtccctttaagagaaagggctacaggagaaggagacattagctagcttcagggctgctgagggattttgagtccagagtcaagtgttttgtaaataccctctcaatattcactccccatcttcagtttttaaggtgctgagctctattgataggatataattattaccaggaggatggaagcacacacctatccaaacatgagccgcaggctggagatgcagcccagtctgtagagtagcctgttagcatgcaggaagccctgagattaatctccaattccagaacagtatcaaaacagtttgtgggtataatcccagcacttgggaggcagagtcaggaggatcctacaccgggagttcaaggtcagcctgagttatatgaaacaccctctcccctctcaacacaaatgaaactgtgagcagcaaccagccaaactgagttttgtaatgtagccagagaatttttaatcagcagcctctcgtagctaaccaagcctgctttatttactagaagcagctaatgggccacctttgccctacatttgtctagcctagccccctcagtagctgctccagacaggcagtgatgctttcaaagtctctctgcctgggctatgcacggcataaagtgaacttggcatgggtgccacgtgtcaaatcttggctgtggctcacttcaccctctttaccctcttagggagcttgtgggcctccggttactgcttctgcaccaaggcgagcctgggacctctttggatttccagacctgtcccctcctcccgccactgctttgtcatacacttagtactcagccaatgacttgttttggattcctgcagttcgagctgactcatgcagtttttatttgcatccgttattgacctcagccggcctggttatggtcattttcagccttgggtcagctactcccattctgtactcacagcagcccttagaaacgggtgtagtgactttaacttgagtaagaaccaaggttcattcctacgtatggagtggctgggcttgcagcatttacaaaccagatccatatcccgtgacccctactcttctctttccacttagtctgttgtgtgttggattcttaataggtgtgcagggcttcctctgtccagttctgtctcagaaggagtctagaaagctaggaaactttatggtatttgaggagcatttcagttgcccacacagaggccagaggggctgattcttcgctgattgggacttttgagaaattttgttaattcttttacagtcatttataggaggcaagggaaatagatcactagaataacagtccccaatgcacccggggccccagccagtacgcacagaccttgatgaagtgatactcaaatggaacagccagacctttcttagcatctctgccaccacagcctgcaaatgaggtggtgttgtgaccgctcccggtcagcatggctctccagcttcctccgtccctcctcaggagagatccaagactgggcaagcccatgtgtgtgcccatgcactccctgcaaaaggctcctgggagagcagaccactagcttggcttcatagtgcatgagggggagtacagtaatgagactgccaacatggccactccatgatgaccaggaggaaaagttgttattgggaatggagagagaaaatattcaggggcatctggaagagaacggagcagagaaacaagaaagctgcctggatgaggctagagctgaggaagatagaaagagttgtggtgatagaaagatagcaagagaaaaaaaatggatcgtagtgggagagagagacagacagacagagggagacagatacacaggcagatagagagacagatggacagacaggcagacagacagagcaagagatagagcaagaagatagtgtagggtggataaaacacatggattaaaaggaggacgagtagctttgggaaggctaaggggcgaggatgctatggtggcctttgaaatgtgtaacaggaacttgtgatactgagggaaattggaggtgagcctgggctttgataatgctgataggtgtcacaagtataagtcaattggagtgccgtatgtcccttctgtcagaggtaagggaaccggaaaacctgtttcacaagttcccaaggaatactaaccagcagaaatccttccacagtccagcatgagctcatttctggatatttggacagtccgagagacctaacaaacagaaactgtgccccttaagaagactcttaggtggtggggtacattccaatgcgccaagatagaagggctggccagactccccaaatgactcttcctgggtctccaaacatgcgcacacagcctttaggttaccaaaaggcctgctctctgagtgcacagcactgtggcgacttgtaggtgaaggtgctgggggaaatggcttgttgataattatccccagctgttctgtggaggcggatctggtttgcccgaggctgtgggatgggaccgtgttacactgctcttttggttggagattataagccagctgtggtcctcaccgagactgcctgactgggaagaaagaatggttattttttgcttccttgagtaggattaggccaccctaaggttctctagtccctgcaagggcctgcagcacagcactatgggtcttggggctctgggtgtcatgagactgaccccatgatgttttctcgtggtaccttgtcttgaggtaaaacctcgtgcaagtccgaagtcacacagcacctttggtcataatggctagtgctggcttgtggagcctttggagtatttgtgtttggttggggaacatggtcaccaccatgaccagtttccgccatcaccctcctccctggtagtaatctttcagttgatctgactggtatattgcctcagatttggagtcatcagatagctggccttaaaaagagagcaacagccctcttgcccggtgggcaacctctgccctttctttccctctctgctcttcggacaccaggctctgcaaccttcatggcacctcaaccacatgtcagtataagtttgcagggctaggggtgggggtggggcttcttcctgaatgctttgggaaccactgaggctcaggcattctgtgtgtagctccttccccatacagccactgcctagcctgaaatggttcagtaggtaaagatgtctgccaccaaccctgacaaatccaaattgactcacacggtaggaggagagcaccaatgcctcattatcctctgacctccacaagtgtaccatggcataagtgcatcccccagtaaatgaccaaggtaaataaagacttttttttttttaataggaggtatggggcctggagatcacaaccctgccacgcatcatgtacttggtatgcattgctggtcttagacagttgtaattgctaagcctcaacttccccattttgtcatgaacaggccacagggcactggcgtgacgctttgtgggcacagaacagttggagtcctctgttccttcccctgccccacccaacacctgttcgtgctctatggagagagcccaagtggggacacaatcaccttggtaacaaggagactaataataggttaataataggttcttttttaaaaccctggagtacttcacggagtctatctgatggagaaacaactgctgagagagagcactagtgctggcaaggtggcatgcagacacagggaggggcactgtggtgggagattctgaaggctccttgctacctcggatcccctgctcagagcagctttctggagctctccgaaggtgatgcaaatgagcagactgatggaagggagtcactggtaggcagtgccctgagatgactctgtccctggtagcacccccttgactagctcagcagcaaaatggagagtgtgggtggatctaactggaggtcatcctaagcagaccatctctttagcgagtgctaccggagggagtcagatggccagctggaggaggatttagcctccagaatctgtgtttagcaggtaggtgttgacatgtggcagggatggatgttagatctagatgaaactgcaacattgataagaaaacggggacagttgcaccaccgccagggactgaatttggccaacagctcaatgtgcacggaggcagatactccccagtggctttgtgggcccctattggggaaccaggctgtgctacttgaacttctgacctaaggaaacaagagcaagcaaacaagagcctcgtgctgagcgagcggtgcagcaacaagagaagcccatgcagggcaccggcggcggcggactgcagaacggatgaggcacacaccgtcccccatgttatgctggagactctgggggagacgataggtgtttctggatccttccactttctggggttgaggtgctgggaatgcttcatttgcatgaagaggaatttcagggtgctcatgggatgtgtccttatagggagagaggatgatttacctgtaatttggctaccaggctacgtgacttcatctacagtagcagaggtgtgggctcctaaggctacaggctttgggacatatagccagagaaagcagtcttactcttgccagcctcaggatgagattttcagggtttggacatacatctagaccttactctggctcaggattggttccctcagttgcaccactttctgggccccacacatgacagctgaggccaatgggcatttatttttttattttttattttatttatttatttattttggtttttcgagacagggtttctctgtatagccctggctgtcctggaattcactttgtagatcagactggcctcgaactcagaaatctgcctacctctgcctcctgagtgctggaattaaaggcgtgcgccaccacacccagctccactgggcatttatttagcaagactcaactgctaagtgttcacagccctggctgttcccctcctccatcttccttcccctccattctagtccatgcatacaacctaatggcatgaaaaggctgccccaatcaacctacctggagctggccattagctcagcactttggctcccgcagacacacctgcttatgtcacacatctcttttacctcccttaggccaaaagcaggaactcctctcccttctgtgtatagttgcttctccttgctgtgaccaagtccatgatggaagcaatttctaggaggtctagattcggtccatgacgggagggaagaatgggaagcaggaagcatgtaggtgggactggaagaggaggtgcaatttaaatctcaaggccttccatgacccacttccagctaggccctacttaccaaaagttccataaccttccatgagtctatggggaggggggaccacttctgtctttcttaaggttttactgctgtgaacagacaccatgaccaaggcaagtcttataaggacaacatttaactggggctggcttacaggttcagaggttcagtccattatcatcaaggcgggaacatggcagcatccaggcaggcatggtgcaggagaagctgagagttctacatcttcatctgaaggctgttagcagaatactggcttccaggcaactagggtgagggtcttaaaagcccgcacccacagtgaaccactattccaacaaggcaatagcgccactccctgggccaaacatatacaaaccatcataatctcacatctaaaaaaccaaacatttgggaatgtccaggctggggggagctaactggcaacttcccgagaacacgtcttccccgttactgtagcctcatggagagggatggtatttggggtgcgatccctgctgttcattctgtgatagtaacgctcacggaagagcataggaagttcctatttttcataaggctcctgtgcaaaagggaactggagccatggactggggtcacggtgttgaagggcttggagacacagctccgtgctattgccagcgggacctgaggagtcccggtttaagagacctcagcttggataaagtcaggtccttggctttgccgaaggaaaagaatttcaggatgagccagaaaggagcgccagctgaagtttattagaagacatgtttagcaaatgtaagaagcagagttagtagaaaggcattatgggatacaggcgcaacgtccaggtgcgggcttctggggggagccccacttctccctcttctcaacagctagatgtgggagttagggggcttctggctaagatcttccaggggttgctaaggagtttaaacaagatcacagagaggttcctgaggggcatctgacaaggctatagtaaggttacaatctggattacagggatgcaggaggctagggcaccttcactgtaaacatatccacagtcttgcttataaggcacgaggcccttccttgggtcacatccacttagaccttgagcctggtttattgctattctaaccttccgtatttaacagtatttctacgtaagaaatactgtaggtcacctggagagggacccttgcccttcccatgtccccatataattttctgtcacttcctatgctgcctctgttggggacagtctgtaaaggagacgttggggcacacgctggacttggagtgggtccagtgtctgcatggctacttttccaagttcaatttcaggctctgtcgctgtcggccatgctcactgcctctcattagtggtgaccctctttcctggcccagcgacggcacccggggctgtgacaaaggagctgaatatgggtcaccctgacccacttccatctcaagttcagaattagggtggaaacttaatcaagttgctctgagacttgaaatgccacccagctgtgcgtgcggctccccaaccccctctgccctgatttctgatgctcgctcggtacagttacctgctcttttcccagcctcctctggggctgtgcgctgcagatgctgtctgtgtgcacagggccctataactgggcaataatggggatcatgtagcagggtgcaccaccacactagcctgaagctaggattctcagcaacaaggacagctcagaaaaacagttggggtccagttggaagtcccagatttgactggtgaccaaagcaagatgcttagcatcctaaaggcctagtttccatattagagtctattagagtctgtgtcccaggattgccacaggctgaacagtagactgtgaacgcaaagcactaagcctcctctggcagaaagtaattacttagcgcatggctatcgttgctatttttagaaatattttaaatgatgtgtgttgggggtgaggtgggtgtgtgcatgggaacacaggtccctgcagagaccagaggcagaaagagcccatggagttagttataggcagccccacataagagctagggacagaacttgggtccttgcaagaacggtatgtggtttgaatcactcagtcgtctctccagtcccttgtatttactagttcaagtggtgacatgacacgtgcacacacatgcgcgcacacacacacaccatgatcagatgagtcgtctgaactggcacattgactctgttaggatgctctggcaatagaagactgggtggggttcatctcttcagtggagtttgtatggaggaagggccagccaggcacggtgggatgggatgagccatctgtgctgatgatactacttctcagtgtgtgtgtgtgtgtgtgtaaaggctttgggaagtgaagcaggggtcaaagtgtggatgggggagtgaagcagaggtagggaagagttgagagaagagagaaagagtggacagagacaaggctagcctagcctaaatggcgagctgctgtgagtggagctggctaaatgttctggagaggatggttgtgctactgtagccaggactctggctttcagtcctgttcatttcttttccttcaagatctggttctgcttaacctttaaaaaaaaaaccagaacaaaaagatcttattttacaaattagagctgggtgtggtgatgcacgcctttagtcccccaaactcaggaggcagaagcaggtggatctctttaagttcaaggccagccggagctacatagtaagactctgtctcagacaaagagcaaaatctttgtatctctgtgtatgggagccagaggcaccaggctccctggggctggagctacaaggctgttgtgagccacaggatgagggtgctaggaaccaagctcgggtcctctggaagaacagtacatttttcttaaccaccgaaccatttctctagactcacagcttaagtttttttttttttttgaatggtaggttcttttaggcatctaatgagcctaattccaaaaatccacacttcacaatagacttataatattttgtaaaccatccatagtcggtggcttctgagatctcaagtaagtacctttgttttagctcaatttctaaatggaaatcaactgaatgttgaataggcaaactcctatacatgcttcagaacccagttaaaaagttacctcttaagcagagctttcccacttgctctaagcagctgggcatctcctccttcctgctgtattgcattgtttgtacctctgcatcctgtaagcaagcactcatagcctggctcgtttcctctgctaattggattgggggcccctatgcatcttgtcagtcccagagtctgggagcattggagggttagactattaaggagttacctgcggacaagatcaagggtcagggtgtaggttagggtgaggagttagctgcagaaagggtttctcttttatcctcagacaagggggaccctatctgatggatctgatggaagaaggccttttgggagttatgccagtctgctggcacagctgcccaggagcttccagaggataaggggctgtcagcacaaatggggtggtcaggaggaggtgtgggaacccggcatcggtctcgaagattccaccctgattagataaggagtatagagttggaaaaatgccggcagggaaggatgctttgaagatcctggctgattctgcctgggatggccctggctactgggtggccgcaccttctgcctgctccctgggagagcggagagtgggtatctttccttagtatgtccatgggaaacttatcacctaggttcccaagatgcagaagcaatattttcgtggagaatcagtcccacagttctggtctctgggaggccaagaccttgactgggacttagtcacaacttgagagaccctgagcttggaggaaatgtggaaaatagctgcttacaaaagggatttcgtatctcatggttggaaaaatcttccctctgtggcattaattccttgtgaagtccatgggcattgagcccagtgacagaaaacacacgcagtgggatggaagaaacctcatttccacttcccatgagagacctcaggagggcatcaagctgcttgtgaggaagaaggaaggccctccccccacagctgagagtatgtttatcttccattaggctccatgcccgcctctcagtctcccagcctcagctccacgcatagatggggaggttccatctttctccttaaaaaccagggagcactcacgttatttgttaatgtcttggtcctaaaagtaaagttaatctagctacagaggtctcatgtctggcttaaggtctcggtccatgcagaagacagttaaggagcccggcacagttcaatgtgttctctaccatccaatcttggtcacacaggactgcatggacagatgtggccatgtcccaagacattcatttctgggcacggggacaggtccctcagtgagtctgctgaatttggagctgtagcatgatggctcctggtggctggtatctgtcacagctgccgtggactcgcagaatgcctgcccgctcctattgctgttaacagtggagaactctgatggagcactctcttggagctcaagaaatgtttgggactggcaaaaacacaaatgctttctctcagccacttcgtttgcctttcatctgctttgccctttactgtgtccacgtggaaagagggaagccatgtgttgttgctccaagggcctttgcggagtttgctgcagtggaaatgttctggaagactgtcggcagtcccaaagcttggggtcctctgcctttgaggaaagatacatttcccatgaagatgctataccacacctcacctggtagacttaccaccaggatctggaatagcagcgaaggctctcccattttttccctagggagaaggcacatacacaagtctttggggggtacgttatgtcagtgagaaaggacccattaagattttctgactctcgccagacggtggtggcacacacctttaatcccagaacttgggaggcaggcggatttctgagttcgaggccagcctggtctacaaagtgagttccaggacagccagggctatacagagaaaccctgtctcgaaaaaaacaaaaacaaaaacaaagatcatcaggtcctagcactatgaaagaggatgagaggccaaccagagttaagagtcgtgaagtttcccttccagctcgtttctgtctctttaaggagagatgaagtcatagcctgttcatgtaccactgcatcccagtcatcttgcttttgtcgttgaatggtctttgtgggtgccatctcccgtcatgactcactgttagtttggtttcgttttcagacaggatttctctgtgtagccttgggtgtcctgaaacccaccctgcaggcgagcgtggcctcgaactcagagattcgcctgcttctgtgtctggagtgctcactcttctctttgaagattacactctttcttgcccattcttggccatctacacagttcccagggtttttatgttaaataatatgtacaaagcacccttggggcaggaactgtgtgtgttggacattcctttttctttgatttctagaggttgcttatggtattcaaggatagagtatacaagggctgctacccaagtccatctgcaaagcatgacgtcacaggctgtaagcaggggattgggactgggtatccatatgtgcaggagactctggctgtgggcctaagactcacaacgtttagttcttatccttgaggaatgagaacccaaggctctgagaccacagcaagcatcagaaccccaaaggaagagacattgtatccacaaggcactatccacagatttcagcatggggtagtagtctgtacctattcaccctccattttccagagcattcaccagagtcttttcgtctgctgagctaacaaagctcaccctttcactgctcatttgggctgtatgtgctgaagtggattggttttctttcatagttttcacaattaaaaaaaaaaaatcgaaaagcctcattcacatggccagtagagtacaacggaagagatgtccgttagatggtttgtttggggacttctgaggtagggtatagcatagtgtagccagagcccatagtccacaggtgtaatgcagatgctgcctgtattggtcactcaaccttgtatggattatctgtttgctcgagcatctgtccttggcagcgtggacctgttgtcagagcactgtgtgatacgggtgcatggcatctagtggtacaaaccgtcattacttcatccctctgccagagcctccatcctcacttgggttctaggagttacaaaggctggtgccgtcctgagacggggacagccaaaccaccatctttcagaactggcaagaagatttaggcattctgtatgcttaaggctgtcaccaagggctacaactaggtgtgtgtgtatgtgtgggtatctgttgtgttcctttctgcagtttgcaacagtcacatttgtttggctagcttgtccaattggagaattgagagggctcctctagcgggtactccctcggtggccgcagcgccccctagcggcttcctccagacagggccactgatctgctgttcttgttctctccaggcataggcaagaatgtcatctgtgaccgtaccgccacgccgctggacgccttccgcatgatgtcagcggcccactactacccgaagctcatgagcatcatgggcaacgtgctgcgcttcctcccagccttcgtacgcatgaagcagctgattgaggagggctacgtgggcgagctgctggtgtgcgaggtgcaggtgcacagcggtagtctgctgggcaagaagtacaactggagctgcgacgacctgatgggtggtggcggcctgcactccgtgggcacctacatcattgacctgctcaccttcctcacgggccagaaggctgtcaaggtccacgggctgctcaagacctttgtcaagcagacggaccacatcaagggcatccgtcagatcaccagtgatgacttctgcaccttccagatggtgctggagggtggagtgtgctgcaccgttaccctgaacttcaatgtgcctggagagttcaagcaggacgtgaccgtggtgggttccgctgggcggctcctggcggtgggcaccgacctctatggacagcgcaatagcgccccagagcaggagctgctgcttcaggacactacatccgtgagcaactccctgctgcctgagaaggcattcagcgacatcccctcgccctacctgcggggcaccatgaagatgatgcaggcagtgcgccaggccttccaggatcaagatgaccggcgcacgtgggacggccggcctcttaccatggctgccaccttcgacgactgcctgtacgctctttgcgtggtagacaccatcaagaggtccagccagactggagagtggcagaacatcgccatcatgaccgaggagccagagctgagccctgcctacctgatcagtgaggccatgcgcagaagcaggatgtccctttactgttagcactgggacctggtggacttgacctgtttgctgcgtggggccagttaggaggaaatgcactgtggagtgggtggccgtgggtggccgtgggtggggattatggaaggggcagcatgaatgcacagcatgtagggtggtccccgtcctaagtagagggcccaagtcacaggtgatggtggtgggccgatgtcatattcagaaaggcgtgccatcttaattgggtatctgatgagaggaagtatgtttaactagcacctttgcagtccattactgtgagaagcaaggaggggctgccccttgccctacctcatccatccacagaccttggccttctttgcaagccaaggctgtgtatcaaatgaggagctcagccagagctaggctctctgtcagcgccccccactggcaggagagggcatttcatcaaatgcctacatagggtttttggtttggtttttggtggagggaggtgagggtgggggtgggaagggcgagcctttgagaaagttgtaattccgggaagccactgtgtgttttgctttaggaacctgcaggaaaagtgcaccactcccttggttgctgtcttctaggaagcattagatacctacctggctcgttgctgttagtgcagtatagagtaacgggcagccatggaggcggcaagctgtgcctctgagctgaccaagatggcaaacaagctacaatgagctacttcagagtcctccttcagcaggggtggctgtggatcaacagttctgccaagaggctctctaggcagcgctgagaaccgctacatgtggcatgggcttaaaactgcagctgcctgcctgggtggggcgcctgcaaccctgggtgtagcaatatgagcgccccaaaagaaggaaacatgaggccagccccagagtcgctgtaagctccaactgccaagctgaagaaagacatttaggacggccagctttgtagacttaaacaagaagcctgtggcttcaccccatagagtccctttccctttaagaagactcaaggctcttttccttgcctttggccttggctctcaggattctgacagctggaaacttctgaataggtattaaaacaaaaagccaacagggcacatagccctcagtgtttctaaaacagggatacagagcctggagaggtctgtacataggtagagaaggttcaagttggaaaaaacaaacaaagctatctttttcttcccctcctgtttgcctagtccccccccccaatttaaaactagagatgaccaagtactaactacgacagacagacagacagagacaacgcctattgtcacataggtagacacgcctttgtaaatgtttgctctcctcaagtatcactaaaacattcgagtctggtcttgagagaaagagcaagtcacatacattttgaaaatgggagtgttgccttttccttggctggctttgccaaccctcaccaggcagttttgaagctggctatgtagactctaagtagtcggcctgagtccagtcagcgttcctccctggggccctggtaattcagagacagtcatattggaggccacacacaccagcagaatcatggtccttcgctagtgtaaagaggcaggtgttgtcctttaaggaagcccccccgccccccccccaccatcatacaacgtggtaaagtcagtcaactgaaaccttccgaggctttgatttgctgccacccctcatgaatagtgttccaggtttgcagttattggatcagaacagcactcttcacatagccacatcatagacgtttttagggatccctgctctcctaaattgctccccgagtcagtaattcccccatcccagctaccccaaaaaagctgtgattagggatgaaattggggggcatggtgggtggctctatgaaattcatttttctaagtcatttacctaagtagatatgcgtgggcattccatttctgggttctctactctctccaggatatttgagagctttccttttagaggccttggagctctgtgatgcacatgcagggtttatacaaaaactcccatttgaggctgggggctatggaaagaatatgtattctttggaagaagcatgagagaacagtaaggatactgaggttctatcgagtgggacagatggagaggcagttctctgaaagcaaaaatggcggcacacagggctaggggcttctttcatgctccttcagctcctgcctttccatgtgcacattcttgattggctggagcagtgtgaggctgaagccccaagctcttgacaacattctgcagaacaacttggatctaagtaagtcctggcaataacccagcctacagaggctgttaggagcctttccagtcagtttcccctcaccttgctcgctcccatccttttataagtactgctgatggtctctactaaaagccagggttcccagagattttaaagcaggtatatatatatataatatgtgtgtgtgtgtgtgtatagatannnnnnnnnnnnnnnnnnnngaatgccctgggtttatctgccaagttaagagtctaggactcctctgtggtcactgtcagttcctctaagacttattctcagtggtaaagttgcatcttagttttcctggcagcacatctctgggtcaggtctcgtcagcactcaaggtacagtgccacccggctcacccaccgaacacagtcttgtagatacatcttatcatcatctacaaagatagcattgggtactgtctcattccctctatgtatacatgaagatgtgacatgcccaaagccacacaatgagtgagcaaatcgctgtctgtacttgttgttctggccgggaaagcattcctcatggagccctgtagggggcgtgctcccacctcaaggagcaacagtataagaggcgtggcctggggtccacaacagccacagttgagcaggatgccagcaggttggcagttacagctgcagaaaatgtagtttttcacccccttcccagatggaaatgtcacttagctgcttttaagcagactttcccatgttgatgtttaagtgactcagcagccctcggcgctggagactgtctaagcatcattggctgtcttggacttggttgtggggcataggaagaagacacccaagggaggaacacaatggccatggccacccacttctttagattcagggttggggagcccatttttcctgatttgcagtttgtaactgacgtcttgtaccttcagggctaccacacagggaagggaggctcatccaggccattaagctgcctagctgatgagctcagacctgcactgcaccggacagtattcgctgagctgtcacaggaagacccgtattttacagatgtgttatgtgttagggatagaacccctagctctgtgcatggcaggcaagctctctaccgctcagccatacctccaacctcaattaaatcttgaaagtattcagaaaaccttgtgacaacaacaaaagggcaatctctaattatgcatctctggaggctaggggacagagagccaggtattcaccctgagaagaacgcaaggcccactctactcataggctattgtcctattgctggatgtgaactttcactctgactagcctgtgactctggctccattcactggtgatttcttttgcccaccaaaaccccggatcttgcaggacaggatgacactggggaactaagtacctgtcagacaatcctatttgtttcctttgggcaagggaggtgtcagaagtctgaagtatggctccagagccatccccagcacttgtattctgctagctcactctggtcagcgtccagcaggtgggttacgctctgcatttagctggggcttctagaacttctctgcagtgatgtggtttcctcagagtttatcagtctgagtgattgcattagtacaaagaagctagcagacccaactggccttttctcccctgcatcagggtccttatctgctggagcccttaagagggccactgaagcctctggctctcttccaggcgactgacgcattgcactactgagttccctgaagtctgctgcagccccttgtttacgccagcagagaacagagtgataagaacaacattcgagtggacacgcttgacgcttagtgcagcgttcaaaccttgcctggacctggaaattgtcagggccatagagtcccctgtcactgtgtgtctcctgtgccctgcccagctctctgctgtcccctgcagccaccacaagggctaggctgtccaatgagccccatagcttctaagaaatgcagtggcttatttgtagtactccgtgacatcccaggtgaagaagcaaaagcctatgatctgatctgatctcctttattctgccctgtccctggtttaggggagggagaaccttctagcaactacggctttgtttgctgcctggtgcttttatagtctgtcatttttttttcatttcctttttttaaaaaaaaaaaaaaaaaaacacaaaccaaaattgcattggtttggttgtcattgtctagtctatatttattgttttacaaacatgggtgtatatgtatgtatatgtataaaaaccaaacttatatatataaaaagtcaaggcatgtatactagatattttaaagttatttatcaaagggaaaagatgtgtgttataaagtaaaacagagtctatattttatatataatgtagatagtaaaaaaaatagcttataaattatagaaggttttactttttgttttctattattaaacaaagaaatttaaaagaaaaaaggacagtgactgcagctgtgcttggtgttctcaaggcaaatcactacggagctggaggtggcttgccctccctcgggatctgcagttccaggctcctgagtggatgatgccccactggtgccgatgtggtgctctggatcagggtcgacatgctcagccagctgccccggctgctctgacatcgcttcccctgtccatgaatggctttgacgagttgagtgttggtgggagaaaggacaaaagtggcaaataaagtctttgaagaagaggtgattccagcctggtcttgtctaaccccaggggctcttgatttgggggctgcccagtttgtgagctctgaagcagacggcagtaggggtgggagctctgggatgaggctcggtcaatacccatgaagctaaacaggtgggaaccactgactacagactcaagagatctgccttaaaccattctgaaaatgttgaaatagagggagaggacctatctgtgtgcccgtgcacgcatgtctacatgcatgtttgagtttgtggcaaaggctagaccaaagcacagcttttatatcagaggagcaaattttagaattttctgtttcaatatcataaatcttgtttggtggcccatgtcaccaaatgctattattccagaagtagagacaggaggatcgggagtttaagtacatcctctgccaataagagcatctttgttcactctgatacaacacagcagagggaaggccaaggctatagagactcccccatgacatgcaaacttacagttaagctcagtccaaaatggccactcaaacaccgctaaaacaaagaaagcctgccaggaagtgaacctcatcagtgctaatcaaggcaatggggataagagcctcctgcccagattggggcggggcattgttgagggggcggggcagcatctttacctctcctagcaggttatcctgggaatcaaggctcagtgcaagtcacaaacctaagcaccaagctcaaacatctttgagctaggagctgcctattctttttcatgtcgtgggctttctgtgagatgctgactgttcccaagttgggatcatttcttgcttcataaaccaagaatcgtataggttgagaagtctgaaacccccaaatgctccggaacctgaaacccttttgggtgtcaacataatggactctgcaacatttggacttcgggttttcagattagagatgctcgaccattattcacgtatccccaaatcccaccaaatcagaaggtgaagcaagaatctctagactcagaaatacacaggctcaggtggggacaaggcatgctcaatctgttctgcgtcttgtggaatcatggattgggatggcttccaggctcctggcgactgctcaatgcaatggccggtgactgctcaatgcaatggccggtttctcagcatgccatctaggctcctcatgggtcaagagaacttcacatatcctctcatgtctgtctgtcaacgcatcccaacccataaacagacccaccttctagtttcccttcctttttttttttctggcagtctgtacatagtgagtttgagtacctgtcctgaaactcactatgcaaccaagtaaatttacttgcctctgcctctcaagtgctgggattttgtttagtgttgttttaaatctcatgtattttagaacctatcatgacaagtctggttggctccatttgaaaaacgaaatgactgacgtattttatgatgaattacatgtatgcaaagtatgaagaaattttattaaggtgggagaaatagcatcgccttaatgtaagcaataaggtcccactaactgagccacatctgccttgttctttccctgagtgggaaaggtccctttgcctggggctctctggactttgctcccattgaaagacggttcaagagatctagatgagacagaaaggacacacccttccacagggttggcgccaagtcacaaacacacacagctttgcagctcgctagaaccaaacactgctctaagaaatcggtgccagttaaagcccttcaaatgcctttgcctgcttgttcaagtcaggcttcctttgactgttatctctcagtctgcatctgctgggtaaattcctgaggggtgacttcagcgatgactgaggctcaaccacaggtctgcaagataacgccacggaatctgacctggttgcttgggcttcctctcaaatgttgtactaattacagaaatacctttatctgctaattacatacagatcaaaccacactctttccctctagccatctgtgaaaataggataagtcactcaagggaggctttctcaggcaattatagtcccttggtatccaaggggggatttgatccagcatccacacatgcgcttaagcccatggatgctcaggtcctctctgtaaaatggagggtataccacagcacctacacggtcctcccataaacgttaaatcatctctgggttatttataccaaccctgggtgggtgagacagcttggtgggtgaaggtcttactgctaagccggacaaccagagtttgatctttgacagatcatggatggaagaaggagaaagccagctttcaagggttgtcctctgacctccatatgcatgtgtggcacccacccacatccccccaaatgttttaaaataccaagtccaatgtcaaggcaacgtaaatgcagttaaacttattgtagtctgtaatgtcagccccaatttcatgatgtttttacaaaccttcagtcagcaactcaaaacaacagtttttacaatcaagaattcttattacaatacaacccaaaggccaggcagtggtggtgaatgcctttaatcccagcccttgggaggcagaggcaggtggatttctgagttcgaggccagcatggtctacagcgtgagttccaggacagccagagctacacagataaaccctatctcgaaacaaaaacaaaaaaaacaaaaacaacaacaaaacaaaaaacaaaaccaagagggaccctaaggtgatggggggggggtgcttgtgtacaaagttaaggcttagtaaaaccaccccaagccactaataaagaacgaaagagtctcgatcagggctaggttagggtaaggctagagacccacttgggaagggttaatcataattgcttcagatactccaccagcaaggacgaagcagatctatgacccggtgtcatgcagtcagcctaaagacccactatgttcttgggtttcatctgggacaagttcaccaacagatgaagtggcttttaagtgtgctaagctaacttgatactcaggttcctggcacaaagcaggagacagaactggccccggaatagcagctgtgtggaaatccagctgtgaagggacaacatgtagcaggtcacaaaggaggtgggagggaaaagagggcggggctggccataacagggacggtaaggggaagagagggcagccgcaaaaggattggagcatgtcaagggtaagaatagatgaaagggagaaaacggatgtaagggccagagagctgggcatccaagataacggaaggctatgcagataagcgaactcacatgagctacgcgggagctacgtgggacgtgggagaggagctatttgcggccgacagcctttaatctgtgattcaagaacagcctgtatgaggaggacagcggtgagaaagaatggaggaggagtttctgcaggaagtttatgaaatctggctgtccaaagctagcaagctgttggcagttgctgaaagaaatgttctatgtctaccactgtgttttaagtaagtgccatcctcttgggtccctcctttcttggtgcttttcccatttgcaaaatcgccccccccccttccgcctccccccccccccaaagatacaaaagcctctacttcaccctctcctgtcacctgtcctggatcttttggccccttaccactcagtgtgtgccatttatcttttggcatacacagggcctctttgcccttctcagcagccagagaacctgtcattccagtctcctttctcttcctacacgagaatgtttctgtggaagttcccagcatagcctgcctgacccacagagctggaagctcaacaggggagtctctggcttcttatccctgggactccctaacccattctgtgggtcagatctggatctcctgccttgctggatttcctgtgacatccaggttctcctttactttcgagcagcctctctttcttgcttatatctgtccgtccatccatcctgccattggacccaccatgcatccaaaccatccatgcagactgagtgcttttcagtcatttttgtttcctggtcacctgacacatgctgtatccccttcacttcatctcctgccgatcgatgatgggtctcctccccggcctccttagcctctttccctttccccgtcctcttgaagacatgattagctctgtaagaagagatgaatgctaatactctgactcttggagagaatatgtacccactttcaacaacagactgatgaagaacccaaagctatcgtaacataaagcagcaaagaatgctagggttaaattatactatagactaaacaaaccagccatttacaggacattacactctgctgcttctcacacatttgcctaagactaagcatggtacaacacatgacatccaagagctgtggaatgtatattcttctcatcacacagggaacattgtctagcacagactactttaggccacaaaataagtctcaaaaattaaacaagtaaaatcttataaccaaagtatgttaatacatgaaatatcacaattaaatgtataagtttataatgtacaatttttataaggatgtacaaataacaaggtacacatgaaaatacttaaaatgaggaagaggccgatggtgaggagaagtatacacctcctctgttaggaatagcagagaaatactagaaactgggaacaaggggaacggtagcaactacagtttcctactataaaccctgttgtatcacagggatgttttaaaatgctgccctgtgaagatctttgagctattcagtgtatgaatttgtaactttatatgcctcctctgttagtgatagtagaatagtactagaaactgggaacaaggggaactttagaaactgtacaaggga

SEQ ID NO: 1615 - DNA, 1915 bp, Mus musculus
ggccgcggaggcggagagcgcagagaaagggaagccacccgggggctgcaggcgagacaggcggggccggggaggagtcaaagcgggttccaggggccgggcgctgagcgcaacgagtgccttgggcggcggagacaagggcgggggcgacgcttggcggccaatggagcacggcgctaccgcaagggcggtgcaggaaccccggccgctgacagtcaaagtcgccaactccgccctcgtacccgcgggatcccggagccggagcccgagcccgagcggggccgaggccgcccaaggcgcgctgcgagcgagcgaatatggcagcagaatgaggagcctggcgccgggtggtgtccgccgctgcggtgctgctgctcgggatcggcgcctggacttggggaaaaagaagatccgcagcccacagagggtggtgaagcgggagcgccatccgggagagagattctgccgggatgagccggccatggggcggcctccgcggggcgcacggagccggccggcgctgcggcgggagcgctgcctgagcccgggctccacggggcttcggggcctccctgcagggtctgtggttcggtgcgctgtcacgccaccgcactcgggcgccttgcccggggctcggcggctagcgcagcgcagcgaggtcggtcgaggagccggggactgcgggaccggccggagaggcgtgtgcgccggtgttcgactggagatcccggcagcagcagaaccgggcggacctgagcagccatgcttcccgggcctcacagcccgagtcatcatcccgctgctgaaagatgagggcttcgcggtgaaggcgctgtggggccgcacgcaggaagaagccgaggagctggccaaggagatgagcgttcctttctacaccagccgcatcgacgaggtgctcctgcaccaggatgtggacttggtgtgcatcaacctgccgccgccgctcactaggcagatcgctgtcaaaaccctgggcataggcaagaatgtcatctgtgaccgtaccgccacgccgctggacgccttccgcatgatgtcagcggcccactactacccgaagctcatgagcatcatgggcaacgtgctgcgcttcctcccagccttcgtacgcatgaagcagctgattgaggagggctacgtgggcgagctgctggtgtgcgaggtgcaggtgcacagcggtagtctgctgggcaagaagtacaactggagctgcgacgacctgatgggtggtggcggcctgcactccgtgggcacctacatcattgacctgctcaccttcctcacgggccagaaggctgtcaaggtccacgggctgctcaagacctttgtcaagcagacggaccacatcaagggcatccgtcagatcaccagtgatgacttctgcaccttccagatggtgctggagggtggagtgtgctgcaccgttaccctgaacttcaatgtgcctggagagttcaagcaggacgtgaccgtggtgggttccgctgggcggctcctggcggtgggcaccgacctctatggacagcgcaatagcgccccagagcaggagctgctgcttcaggacactacatccgtgagcaactccctgctgcctgagaaggcattcagcgacatcccctcgccctacctgcggggcaccatgaagatgatgcaggcagtgcgccaggccttccaggatcaagatgaccggcgcacgtgggacggccggcctcttaccatggctgccaccttcgacgactgcctgtacgctctttgcgtggtagacaccatcaagaggtccagccagactggagagtggcagaacatcgccatcatgaccgaggagccagagctgagccctgcctacctgatcagtgaggccatgcgcagaagcaggatgtccctttactgttag

SEQ ID NO: 1616 - protein, 637 aa, Mus musculus
AAEAESAEKGKPPGGCRRDRRGRGGVKAGSRGRALSATSALGGGDKGGGDAWRPMEHGATARAVQEPRPLTVKVANSALVPAGSRSRSPSPSGAEAAQGALRASEYGSRMRSLAPGGVRRCGAAARDRRLDLGKKKIRSPQRVVKRERHPGERFCRDEPAMGRPPRGARSRPALRRERCLSPGSTGLRGLPAGSVVRCAVTPPHSGALPGARRLAQRSEVGRGAGDCGTGRRGVCAGVRLEIPAAAEPGGPEQPCFPGLTARVIIPLLKDEGFAVKALWGRTQEEAEELAKEMSVPFYTSRIDEVLLHQDVDLVCINLPPPLTRQIAVKTLGIGKNVICDRTATPLDAFRMMSAAHYYPKLMSIMGNVLRFLPAFVRMKQLIEEGYVGELLVCEVQVHSGSLLGKKYNWSCDDLMGGGGLHSVGTYIIDLLTFLTGQKAVKVHGLLKTFVKQTDHIKGIRQITSDDFCTFQMVLEGGVCCTVTLNFNVPGEFKQDVTVVGSAGRLLAVGTDLYGQRNSAPEQELLLQDTTSVSNSLLPEKAFSDIPSPYLRGTMKMMQAVRQAFQDQDDRRTWDGRPLTMAATFDDCLYALCVVDTIKRSSQTGEWQNIAIMTEEPELSPAYLISEAMRRSRMSLYC

SEQ ID NO: 1617 - DNA, 144231 bp, Homo sapiens
ggaaatttttcaaaattataggcaaagatttatttatagtatttttatcccaaatattgttttagccttttctcttttttctaattgttctttccagaaatttatctattttattagtctttttattaacaaccttttggtttattaataatatttatattcttggttttagattctttttatgcttttatatttatttctcttttcttctagttttttttttctagagtgtttattattgtttctttctagatcattaagttgaatgcttaattccttaaatttcaaatcttttttgttatccaaaaaaatgaatttaagctccaaatttctacttgggtacaattttagctgtacctcatatgtttttatatgggtgcttttattgtgtttcatttctaaatattttccattttcatcatggtttattttctaatccagaaattgcttagaataatatttttaattgtcaaatttatggggtgaggggatactttcctactgttggtttttattttcagtgccctgtggtgaaggacgacctaatgacctcattcctttggaatttgttgtgatttcctttgtggcccaataaattgtcaagtgtgtaaatgttctgggtgggtttataaaaaatgtgtattctttgttgggtaaagattttttttctaaatatctattattgtttctaaatataatgtaaatttattgtttggaaaagaggaagagaaagagtctacatctcaggaatctagtcttatcagaaagggaagaaggattgcagaagcagaacttgaataatatcctgggaaaccaagaaagctaatggtttgctgtgtgtgtgtgtgtgtgtgtgggggggagggggtgtgtgaaagagaaacagagaggaggctcccatagaactgtagcttacctctgtgattgcacttctcacacactatattgcagttatctgtttgcttgtttgatgcacaaagccatgagttccttaagggaaagcttaaggatggagcttttagctctgtattctcagtgagcatctccaggactcaaacacagcaggcagtaaatgaacagaagtggaaagaaggtagggctgctggtcagctggtatacaagtaccaggtatgattgtgctgcttggtgaaatattcagctgctgccctgagcttttagtaccgctttgccacccactgccttgacctcttcccaagatcccccaaaccttactgtgatctagtgaatgaaagtgttgaggcttggtctagcaaggaacctccaggactctgctccagaaatatacatatttgctctgattggtcggtgcccatagcataccagttgttaaatattttttctataatctctggttgaagaaatgaatagtcttcgtttccttctacaccttttttgctgagttgtgtgatgtgttctctctgccatccttctcccaggctgcactttggccctggttacttctatctaaaaacaaacccagtgtctctcagccttttgagtggctttcttttggaccttataattacaaggccacagcctacgtatggtgttactgcctagatacttccaggtcaagtgatctatcttggattctgcatgttgcatctattaataaataggtgagatgtttgaaatggagcatgtattgttttatatatctactctttaaaccagaaacgaagggcctaaaatagtactcttaatttgaattgcagatgccatgtcattctcctctctcaactggaaattaaaaatttaaatagtatttatttactttctgccagactgttataaaggttatttttctggtgcactaaatctgtgtgtataagcagcatgttaatgacttgggacgctaaatagttttcctatgtgcttattgatctgcctggaaagggcaccatccttgctgtctgtttatttatagcgcaattatatcatctgccctacacaccttaataggctgacagaggcagcagaaacgtacactgaacagcattaccccagagaagctgtgtgcatgaagaggccaagcaccctgagaccttcacacaccaaaaagaaaagttctgtattttgctcagaagcttctgtgatgcctaaactcctatgcattgatgtaagggcattcccgctctccaagagccatggattggctggtggtaagtcaaagagtgtctaggcttctcttggcctggtgggtgatacagataagcaacgtgttgcagtataacctacttgagtcaactattattttgggcatttcagaggactagtgactagctagacacttttaggtcttgacaagttcatgtactcagaatggaagaggaaagagatactgaagcatctgaccagaactgttagttcacttacacatttaaatggtttcttttccttattgtgactgtaagaaaaaaaaatggaaaaaccagaaatgcaggcaaaggtgtattacttttcattttctaggctatttattcttaaaaatttatagttgtaggcacaaaaatgtgaattacttaatgtcactgtggagttaaaataattaagatggtagcttttctatattttatcatatacatacgtatattttatcataacacaaagacaaaaatatgtagttgtgatcatattatacatacaatactgactggcattgtaaacccaacgtcatgctataagcattttgtcatgctattacatgacgttagaaaatgttttcatggccgggtgcggtggctcacgcctgtaatcccagcactttgggaggccgaggcaggcagattacctgaggtcaggagttcgagaccagcctggccaacatggtgaaaacgctgtctctattaaaaatacaaaaattagtaatcccagctacttgggaggctgaggcaggagaattgcttgagcccaggaggcagaggttgcagtgagctgagatcgtgccactcactgcactccagcctggccgacagagccagattcagtctcaaaaaaaaaaaaaaaaaaaagtttccacgcctttgtggctaatttgttcattcaacaagtatttattatgtattagtgaggtaccaagtactgttttaggccctgggatatagcagtaaataaaccaataatatcccttgccccagtaggcttacattcctacattccagccaggggccaaggaagtgaactcaaagcagactgtggtaagtgctgtgaatggaattaaacggggtgttgttggagagcaacagcaggggtttgggaaggatggctacctcaatagggtgggaaggatgcaacatgtgaattgagccccaatggcctctccagccaggagaatgaagggctgagggaagagcacttcccagatgagaaaacagaaagtccaagtgtcctgagacaggaaagatccaggcaagaccaaggaaccaaggggaggtgagtgtgactgaggcagaaggggcatcaggtcaagagtgggtggcactagaagtgcagagaacagagccacctgggtcatgctgaggggtatagatggcattgtcagtgcagcgcagggagcaggggagggctctaaacaagtcagtttcatgagtgatgcttttgaaagctctctgattacctatggattgcagaaggcaagagagtgacagtgagtcctgttagaaggctactgcggtagtccaaggcagagttatggtggccaataccgttccatgcctctgtccccgaggagccgcaccacaaacacagtgttgcttttcctgacctggactgcagctctagtaaccccctgcttagggagcctgttgacctgtgttagaaggggaattaagtgtgcttcccttccctacagggaccaagtgcttgcaggggaaaataggggctgtggtaccctattataccacaatgtaagttcaagggcagcatgctcagtggtcacatactctgattttgaaattaggtgatttagttcaaatgcttgcctttatgatctcaggaaaattacttaactttaaaaaatctatcagtttcttttgtaataatggggataattgtatcttcctgaaagagctaaatgtaaatatatgcaaagtgcttagcttaaaaacaagttgggcctggcttgttggctcatgcttgtaatcccagcactttgtgaggctgcagcggaaggatcatttgagcccaggagttcgagaccagcctgggcaacatagtgagatcccatctctcagaaaaaagaaaagtgcttagcttagtgcatcacgtataatgaacacttagtaagtggcacctattattaacaacaaaaagaacaaagagttgaatgtataatgatgaatggatgcttttaaaactctcctaatgaaaactagttctggagcatatctcagtgctaggaatattagactgtttatagacctttactattcaagtttttgaacctggcaaagctataattccacaaaaagcaaaagtatttcattccacagacattaagatttataggaacactgggcatctatggacagtcaactaaaaagaatcaaagcctgtttctactttgtgtcataaagaacaataaacaaatctaattaaagagcaaaacttttctatttcattaaaatagtaacatatttccaatattgtggaagcaagtaaaccaaactatttacagtggctgtgtaaggatagaatgattaaggctgacttcgtcttattttctaaaatgtctgtaatacgtacaaatgactcttacagtgaaaaataccttaaattatcattaaactaaattaatatgagaagaaattccattttatcatcatcttagagataggaatacaattatttcatttattttatttcattttattattactattattatcatttgagacagggtcttgctctgtctcccaagctggagtgcagtcaatcatagctcctgcaactttcaactcccgggattatgcaatccttctccctcagcctctcaagtagctggggctacaggcacgcacaccattcctggctaatttgaaaaaagtttttgtaaagacaggatctttttatgttgcccaggctggacatttattttcagtgacattcaactgggcctaaaatcttcacacaaatgcaaaaagtagaggctggcagctaaatcatggatggagggaaagaaaattttaggcttattttcagaactgttttaaaatgtcagaacctcaggttgtgttacaggttgggattcaggatccacggtttaagagggtttcacatgggccgggcgcaatggctcacgcctgtaatcccagcactttgggaggctgaggtgggcggatcatgaggtcaggagattgagaccattctggctaacacagtgaaatcccatctctactaaaaatacaaaaacttagccgggtgtggtggcgggcatctgtagtcccagctactggggagactgaggcaggagaatggtgtgaacccgggaggtggagcttgcagtgagctgagatcgtgccactgcactccagtctgggtgacagagggagactccatctcaaaataaataaataaataaattaattaattaattaaaaaaagagggtttcacatgaagaacttgaagaataagactcgtctgtggggaccatgtgcacaggcactgtgtgtgcaaaggtctttatcatcagaacctcagaatagatgcatgctcagagttatcctcccatgcccaggatggatgaagcaagacctgcctaactagtgaggacacaagtgcacgcctagcttctccactagcctcaagctgagaaatgacgccaacatttttttactctcctcccatgtccaattagctgccaggcccaggagacttcatctctttgttatctcatgatatctctgtgctggtatcttcattcccataactgccacctttcttagtcctctttccctcactctggggtcactgcagtgggctccctgaagggctgggtccagtggcccctcacgagacaccctctgtactggaagttgagtaatggctctaaaacaccaatctaattattcattctccccaccatgttctggcctccgcatacagctttccaccttgagttagcctgttcatagcttttctctgtcgagactattctcctctctttcttctggctaactccaggaagtctttcaaaacctgggcccagcccacttctctcagtgcatgtcttcacagtcttcccattcagatttcagaaccctcctctgctctcgaatcaacccatgcagaccagtcttatgggtgcgtcatgttgtgttgccatggccaattcatgtcatcaatcaatgggctaccaggcgtaagcaacctgggggcaggggctctgtcctactccactgtgcatctccattgcatgtgccattcttgcacacggcacttggcacggttctgatgactttataaatattaacttataacaacacatgattgttagaggaatgtgcaagcattcattcaacaaatgggtactgaatatctagcaggtgccaggtacaattttaggtgttggggattcagaagtgaatgagacacccaaacttcttatctcagtgaatttgtaacctgtcaaggcaaatgaatgataaacagataggcaggcatataatataatgtgaggcagtgacaggaggtataaagaaaaataaagctggacaaagggatgaaatatgacagagttgtcattttagatgagatggtcaggccaggcagtctgagcagaggcttgagcaaagtgagcagagagccccgtggatttgtgtgtgtatgtgtgtgtgtgttggggtggggggaatggggtgtcagacaaatgaaacagcaagtgcaaaggccctggggcaagaacaaactcagcctgtaaagagcacagcaaagaggccagagtgctggaatgcagggtatggggaggtatgcaataggcctatgggttaggccaggtagagtctttcaggcatgctgaggcctttggagttgatttgaagtgtgaagggtattcactggcaggtgccaagcatgacgggtgatgattcaacttatcttttatgggatctatggactacgaggggcatcactggaagcaggtagaccagtaaggacagtggtcctgatagtgatgatggtgacttggactccccaaccatggcagggagaggtgggcagactctggatgcattctgcaagtggagcagacaggatttgctgatggttggctataaaggatatgaggaccagatgactccatggcttttggccaactggtgaactggtgattttatttattgatgaaggaggaatggcttgagagtaaggttggaaatgaagtattctgttttaaacctttaagttggacttgctagcaggacatagttttgccttctatgaaatggagataatgtttatttataaattttaatgagaataaaatgtgatcattttctttgatgttatatagatagaaggtctcttttcttttttagagaaaaggtctccctctgtcacccaggctggagtgcagtggcatgatcaaggctaggcccactgcagccttgaactcctgggctcaatcccacctcagtctcccaagtagctgggactacagacacacaacacaccaccatgtccagctaatttttaaattttttaggaaatgaggtcttgctacgtcgcccaagctggtctagaacttccggcttaagcgatacccctggttaggcctccccagtcagtgggattataggtgtgagccaccacagcaggcttagaaggtccattttttattcacactcaagctaggggtagagttctttttaaaagaacacaaacaaaactccatcttattacttagatattgcttcactgtacaatggtctctctcatcaagaaatgacattggtaacagacccattctctatatttatttatttaacatttatatagaacttactatgcaccatgccttattctcaggactttgtaagtattagtgaatacgatcctgtaaaaccccttgtggtatataccattattacccacccattttatagatgaaactatgccgcagagaagtgatttgctcaaggtcccacagctagtaaatggcagagccagaagtcaacgccagtggctctagctgtgctccgaccactactgcacatcttctgctccctgaaagcctggccatctctgacatgtgacaagcctgtgatgtatccagccccttgggtctgacaccactgcctgcccctgtgcccagataggcgttcctgccttggttcttacaaaacccctgctcaaaagaagcctgttagtattgagggcaacacccctctttgtctctcagtcctccccaggctgctgccagccacccagcactgtgtcctttgtgcctttcttctaatgccctaggtcagcctccaccccgcattgccacacacagcttttttggtatcctgctctctccacgcgccccgcctcactgccagttgttacaagttgttttaaactcttgcaagtatcacgttttccactcgtgttgcggcagaccatgtgctacattgagcccagtgctgaagacaggagatgaacatgacctgacccatgacctctccagagaccttcagctagaagacgtgcctttcactttttagtcccctctcccggcaccaaatgggtgcgaagcgggcattcgatgaatatgcatacatttatttagcaaatgtttattgagcgcctactacatacagggcaaggcagtgtgccaggtgccaaggatatggcggaaaaccagacagacgcagagtccccatggctccagaggtgcggggccagccttggccagtcctcctcagtgccccctcgagggcctgggaagggtgcagggtggtggaggtgggggcaagctgggagaagtaaaggctgcggtaagtggcgacggcaacaggagccgaagcaagaggcgggcgtggcatgtggccagggcgacgtatccgtctcgaaactagacacgagacgcacgtgccgcagcggcctcggagaccccctgccccgctgcggccgtacacaccacagcgtctacgcgggggcgggcatgggcctaggggcgggggaggtgggaggcagatgggagcccgccaagactggactgtcttggaagaaggcggctgaaccgtgcgtgcgcggccggagcgggggcgcgcgattggagcaggctagcttggaaggagaccgtagaagtctgcggttccgtgcccagactctggggcctggattccaatcgcaggcctgttgcttatatatgtcaccttgcgcaagtcccttagccttcattgcggctcattcacatcactggtaaaatgggtttacaataaccttaggttgctgcgaggactaaaagggacaatacctggaaaggcgttagtatgatgctcagcacgcaagaaacgctccgggagccgaggttattattatcggctgttcgcacctcgccgggtcccctcacctaccccaggccaaggcgcccactgctctcttccaagggacaggcgactaacctattagggcgcgtcctgcctagatagatgtatttgcttggttggggcggggtttggagtgaagcagggaagagaaggagatggtgagggcaaagaaagggaagaagcggaggggcaggaggcgggcgaggcggcctgggcggggccggggaggagccgggctgggctcccggggcccgggcgcagcgcgcacccggagctggcggcggcgggggcgggggcggcgcgcggcggccaatggcgcgcggcgctgcagcgagggcggtgcaggaacaccggccgctgacagccaaactcgccaactccgccctcgtccccgcgggatcccagagcctgagccggcctggggccgaggccgcccgagccgcgaggcgagcgaacatggcagcagaatgaggaggctggcgccgggtcgtggccgccgctgccgcgctgcagctcgggatcccagtccggcgcgctccgggccgcatccttagccggcctcctggcggccgcgggattatttcattcccaacggagagctagggagaaaggagactcccccgcggagcggttccgtgctctggcagggtgtagacgtttgtctgtgcgattcgccggctgcgcaaacgacgcgggagagagccggtcccgggctgcggcggcgcggccgcggggatgagccggccatggagcggccttggcggggcgcacgcagcggactggcgctgccgcgggagcgcagcctgagccggggctccagggggcttcgaagcctccggcgccctgggggggtccctgccgccgactccgggaaggacgcgagccccgcgtggcggacactgccgcagtcaccgttctgaggcgccccgagcttgctccgcctgcagctcggtgcgctctgggcacccgggcgccttgcccggtgcacggcggctggcgcaccgcggctagattggctacaggagcggggtgcaggactggctagaggtgggtgtgtgcgcgcgttggactggagatccgagcagaagcagaaccaggcggctctgagcagccatgcttcccggggtgggcgtgttcggcaccagcctcacggcccgtgtcatcatcccgctgctgaaagacgagggcttcgcggtgaaggcgctgtggggccgcacgcaggaagaagcggaggagctggccaaggagatgagtgtccccttctacactagccgcattgatgaggtgctgctgcatcaggacgtggacttggtgtgcattaacctgccgccgcccctcaccagacagatcgctgtcaaaaccctaggtgagcgacccctaccccgcatcctccgtcccacccccgccctttaaccttctctaggttccttcccccctgcctttccctctccgcatcccagaagcttaccctgcatctacgctgccccggggatctgagatcccagatccgactcagagctccctccttcctcgtccccggccttccccacctttgcgcttccctcctgcctcctggcaccacttggacgcgcttccccacgtgtgtagattgcaggctggagaaggcgtgtgttccggggatccgaactaggaagatcagatgccgataataggggatagggtgctccgcgagaagaggaaagttagtcctcagctgtgtgtgtagtgtccaagtgtgtgtgtgtgggggggggggatgggggggtggaggagggttgtgcgcgcgcgcgcctgggagaggcgagtgcgcgcccagaaacgcctgaataaaaggccgcacacgtgtgtcgggttttcttgggtgcgatagaggacctgcccttcagcagcggtggcgccctgctagggtcgtttgtttctttctgctgtgagttagtttagcgtgagattgcagatgttaccatcggctggaattatttcgtctgcgctggaggcaaggacggtgggagtggttggatgggggtgatgatgtattagaatgttttcagaggcgtcataggttagtaaagactgatttggtaaaaccagggggttttaacttttgactgcagcctcccgggaaatgtcttctgccccaatttggagtaatagattttaaatttttaggaggatgggcgcagtagctccagaggcatggatgctttgcatgagaaaaggccctccctaatcgccttcaggaatagtttcggaaggcacagtgttgacccgtgggctggagatgagttcagggtgcctcaccatctggtccctgctcccctcaactcccaggcagtctgaacaatctctgaggacagagtagcagcctctcagcctatgctcaggggaaagagaagggcatgttttgttcatcatcagttcttgcacgtaacctaaaacaatcccaggaaggttgcttgatcttacaattccaagaaaatgagcagctcacctttgaaagctgaagtttctattggtgaggaaaaacacaaagcttataacaagaacaaagcttataaccagatgaagcgaatagtagaacagattagaagggaggagctgcgaaggaacagagacaacatccagaaaccagccggaagttatgtagtcttggaaagactgttttatttgttaaaaataggtatggattcagggtaggtgaaatatacgtgtgttttaattctgtcttcgaagagctatgaacagaatgtaaaactctttctccatagaaaggcattttcatcaggccatttggctattgactcagatgcaacatctgatagaattcctaaggaggctgcccacattgtcagttttaattgtcagttaattttattaagtgtctgccctttgtggcctgtttctttggccttgaactgaatgccattgaactgaatgctaatatttattttctgtttaatggaacatgtatgttgggtggataactcccttgtttacattggctctttgcatatcaaatatcttataacgatcttatggtataattctattagtgcaatttgtacaaaactggtccctgatgagccctgcgtatactggagagcttaggactggtcatatctgaaagaccatgttgttaacatcgtttctccaccgtaaagatggcagttcctgtcctgggttcagacccacagagcaaacctagagcaggagggtggcaatttggggaacaaggatgaccttgttttctggctgtctctgggaccatggccatgaaagtgtctgggggctctggtttcaagagatgtgacacaaattagacatttctggatacttcttctgttcttatttttcaaatatccctgtgactttaattaacaagacatgtctgttacctcttcaaaaccagcgataagaggcataatagacctagtttagtaatggtgatgacagaatagggttttgttcatgtttttagggtaggttttgagcttctttcttctttctttttttaactccttcttttgcagggtgcccctgcgagtgcacagtggggtggtcgtcttggtttgctttacagtcactgttgaaggttcaacacatagaacgtaggaagtgaaaaaccccaaacagttatcaggctgatctggctgttgggagtgtatagatacgagtgtttgcctggaattgaaactagctactttgactcatcctggtaaattgtccttttagcaaaggcctggactttgaattgcttgcccagtgagggtgacaggtctgtagccttcgatccacactcataactggtcacaggcctgtcaaagtaaggggctagggaccctactttgtagggaccctacaaagtgtggtctagggaccacagtgaaatgaaacttcagatcaattgaatcacacacatcctcctttaatttttaaaaatttcctcaaaatccctacctttgtgaatgaggcattcctctgttgtagaggcatttctaccaagtgtactttctacactgtccaaggctgcctcttattaagtacatactgtatgccaggcagcatggtaagtgctgtgtataaagcatttcatttcatgactaaaataatcctctaagatagatattagctccatttcacaaatgaagcaactgagattcagagacctgagtcactttgctcctagacctacagctagagatttgaacccagcactctacctcccccggagtcatttcttcctcttccatcagctgtacctgttcctctgccatagatcatggcagcccaggtcagactgttggagttgtcctttattccatcccagccctggaatcggttcccaaacctgtttgatgccatctgaaactctctgtgtctgttccccatagaagtcaggtcctttcgtagtttctgaactaggttccagtccaccccacccaaccctgcctctagccactatctacactgctgccaggtatggagtatctggcagtgctagagacctggtcatgtcatcgtttcccctttcaggaaaagccccagctgattggcgtgacatgcccagcctcacatcctgaagaagtgagcccagcctcacgtcctggtggccattcccgaacccaagggcttcagcgagcccaccctgctggggtttccttgaatgggccctgttggcgcacatgtccaggtctctgtcaggaacttccttgtcccttgaggtctccttccatgttcgcccttcaatactcagcccaagtgttaccgcttcctctccctcaaaccccccaccctacatacccttctgttgtctcagcactgtgtgcccccatcttgcctagcacctattttaaggcattcatttaacatttaaattttatttagttattttgaattggctatatattcatgtggtacaaatttcaaatgctataaaagtacacagtgaagactgaatgtcccctagtccctgtctttggacaggaggcaatcattattaccagttgtttatgtctcccattcaaggccatatatatatgtatatataacacataatatatacatatattttacatatacactaatatatagatgtatatataacataaaatatatgcatatattttacatagagatacacaaatatgtgaaactctgaatgtgaaagtattaaaaataatatatatttttcaaggtatatcctggcaagtatatgtatgggaatttaatttaatttaatctaattttattttattttttgagacggagcctcgctctgttgcccaggctggggtgcaatggtgcgatcttggctcactgcaacctccacctcctgggttcaagtgattctcctgcttcagcctcctgagtagctgggattataggtgtgtgccaccacacccagctgatttttgtattttttagtagagatggggtttccctatgttggccaggctggtctcaaactcttgacctcaggtgatccatctgtgttggcctcccaaagtgctgggattacaggtgtgagccactacgcctggcctgtgtgggaattttaaaaaccttttacacagttggtagcatgccattcattcttatggaccttacttttgtcatgcaacaatattagcttgaaaatttatatatgttaaaatttaaatattattttaaaaatatattaaatgtattaaatttattacataaattttatatagtaatataatcaatgttaagcaatataaatattaatataaattatatttaatcagttaatatgcattattaaatttatgtatatttatatctttacatatacagcatatacatatacacatttgtatatatacatatattaacatatttatagatatacatgtatgcacatttttatatatattacaatatataacatataatatatacatatattttacatatacacaaatatatgaaactctgaatgtgaaagtattattgctcctatttttggctacctagtatttcattgtatggatacatcaaaatttatttaagcagttccctgttactcaacatttaggttgtttccaattttggcttatacaaccatgtaatgaataatcttgagcatatgtcattttgcacacatgccagcttgtttgtgggatagatatgtaaattgctggtcagagagtacatgctgattacatttaacaaagatattgcctaattaactggcacctaaaatgacactgtattttttgttaatttccttgttgcctctcccagcaagcgtcttgacggtcaggacgcagacaaggcaaagaagcctcactcacctttgtgtccccaagccagcctgcctgggtccagtcttgtttcttatgcagtctactctgtacaatggggaaagtgagcacatgtgcacacgtgtgtgtgtgtgtgtgtgtgtgtgtaaggtatcactctccactttcagtggctcccacagcacctagaataacatccaagctccttggcatgactttcttggcctgaaatggccctgccttgtccatctctcccacttcttggatggcttcacacactcctggactctatattccggccacctggcctcttttctgttcctcacatgccaatctctttcctgactcttggcctttgcaccagctcatccctttgcccagaaggttcttgcctcactttttggaatggctagctcattctcactttcaagtctcagcttacgtgttactttgggcgagaggcctttctggatcctcccctcccaattagaaagttctcctccaacctcagtcctgcctctgtcatcctctttctcttcctggtaacactcttcctggtgtgtgatgatctctttcatttgcttgcttgctttcttgcttgctgtttgtttccccagctagaatgtgagttatttcaaggtaggacccttgtctgcttggttcaccagggtacccttatctcccttagacagtgccagacacttagtcacctagtagacacactatgaatatttattgaatgacaaatgaatgcattttcactgaatacatgtatgcctgggggaaggcaaaaggttctaaagagaatgtgtcaattaacacatagtattcttatcctcctgcatgcagtagctgaatgcctctcagactttcatgtgtggttgtatcacctggggatcttatcaaaaaacagattccaggtcaggcacagtggcttacacctataatcccagcacttcgggagacggaggcaggaggattgcttgagcccaggacttcgagatcagcctgggcaacatagtgagatcttgtctctagccaggcatgatggtgcatgcctgtagtcctagctacttgggagactgaggtgggaggatcacctgaggcctggaggtcaaggcccagatcataccactacactccagtctgggcgacagagtgagaccctgcctcaaaataaaataaaaaccagattcctgggtgggacctgagattcagaatttctatccagccctcaggcagtgtggatgctggaacagtcagacactaaagatgagatagctctctgcctttgggaacagaagacataccctcctgtgagtaattaacctggcaggggaaccgtgctaaaatacctgttgccttgtgtggaatgtgatgacatctgttttcatgatctctgtttttgagacagcagtgcagactctcttggtgaagtttctccatgggagtgcaaggctcttttgggatggtgagtaaggccacagggtttccatgagctttgatcttgctgcacattgatcttgtcccaacttgtttggcgtcatcagctgaggacctggagcaattggcccttttctgtccttcttcatggtgtcagcagttgcttcatgttgaagagggctgccaggaacagaggtgagggagcaaggaggaaatggggttgagagaggattttgctggccagcattgccacgccagcggaaataaggctgcagataatgctcatgatgcacttggacttgacagcagccattctgacatcctagcaaaccctgcatttccagttcttgcttgaggtctcttctggatctatgtgaaaaaggtgattgcgtttttctctttgggttcctgcccctgagcactgagtgaaatgatttttggtctatcaatttgtcgtagagccgaggaagcccttgggcattattgttaggaaaagtcaagcatcaccaatctcatttcatctaattgaaattaggtgcagttgaacgattattttgttgaggatatctggctttgataatgtgcaattctgcagaagtttccactggagggagaagaagctaaatgaagaagttggacattttgataccttaaactggggaagaagagcaacaacaaaaagtggaagtcaatagcatgttttaagggtttcaccaagaatgaaatatacaggcacttagttatatatttgactcagggcaatcatagcccaggaaagagcatcattatataagatgttgtgcttcataacactcatcaatgaaaggaaaggttgacaggttactactgtgtgactttgggagtcataatcatccttcctgagcctcagttttcttaccaataacacacagctaacactatcatatagggttggtgtgataagtaaaatgagagggaaaatataaagacctacctggcagctgccctcagctctctgcatcaagctcaataaacagtagtttttactttgccctaatgcagttagttctttttaaaatttttaaaaatttttaagtgagtagttctttagactcttccaaatggtgcttttgaagattttttaaaactattttttgaagagatgattccctcctgtaagactcagagactatatttaaattttttctttttttttttttttggtaaagggatggtacctaagccaagcttcaggtgtcatatttgctgtgaatccagtacgtgcttcacagctacgtgatcactcaaaggtactgatggggttaccaagagctcaccatgctgctctgaagatttactatcccttgcagtgggggtgcttaggggggtttcccacatgacgcaggaacagggctgcagcagggctttagtagatacctggaaaccagaaaccctctgaattttattctgcttctctctgtgtgtctgcttcctcattcacccctctctacaccagcatcctctgcttcacaggttcatgtggtgggtgaaagattgtccacacgcagctcccaaatatgaacatgacaagttcagccacctgaaaggtgcagccctgcccccgcacccagctgtctctgtttgtaccagatgctttctccctgctcagtctttcctgtggttacccacggtgtgggggatacatgaccaaatgctgcggagaccaccctgctggaggggtggagggattgttaagagcagtcattctgatctgggctgcactctccaagaaaagtgctgattctaacaatctagatggtggaagttattacaaatatggacatttcggctgggtgtgatggccacgcctgtaatcccagcactttgggagtccgaggtggtggatcacctgaggtcaggagttcgagaccagcctggccaacatgctgaaatcctgtctctactaaaaatataaaaattagctgggagtggtgttgtgcacctgtaatcccagctactcgggaggctgagacaggagaatcgcttgaacccaggaggtggaggttgcagtaagccaagattgcaccattgcactccagcctgggcaacaaaatgaaaaaaactctgtctcaaaacaaaaacaacaaacaacaaaccaaatgtagacatttcttgattgtgtaggttttttttgtttctttgttttgtttttttttttttgagatagattctcactctgttgtccaggctggagtgcagtggcatgatctcagctcactacagcctccacctcccaggttccagcaattgttgtgcctcagtctcccaagtagctgggattacaggcatttgcgaccacgcctggctaatttttgtatttttgatagagatggggtcgccatgttggccaggctggtctcgaattcctggcctcaggtgatccacccgcctcagtcttccaaagtgttggggttacaggcatgagccaccatgcctggcctgattgtgtaggttctttatccactttgtgaaatacacatttggcatttcactgttttgataataaccatagcaaaacagtgaaagaaataatagatgtggtcatctattaataccaacctagttattattattaaattattattaaatttaagacatatatattttgaagagtgtgatgggaaagtagataaacatgaccaactgcatggagttctgtggtcttggtaggtttgtagacctttaccaagagcctcctgggtagtgtgtgcagcaggtcacaggagtgccacgagacatagtccctttctgctcaagtattgtcttaggagcttgaaggagccaggagtcaggaaaagattgagggagaaggatttctgcctccagactgcctttgtactggaaactgcaacatcaactcttctatgggtctccagcctgcctgtctgcctgcctgcctgccctgcacattttagacttgccaaccccacaattgtgcgagccaattccttaaaacgaatctctcatctacacacacacacacacacacacacacacacacacacacacacaccctattggttctgtttctctggtgaaccctgactaatacagattttgcctggatcaaggccacctggctaggcaagctgagcaaggaaatacctggaagacgcgtcggtggagaaactgctctggttagttccgctggtgggtgtgggctccctaggagagcagcaggcctctgagcacttgtcctcaaagcaggagacctggaaagccagcgttcttttgggttcagacttgagctaaggagattgttggtaaagaggctgtcacactcaccactgagagccacagtgacacttcaccccgaccaattctatacccgtctacaggtctttgacttctagggtttgggcaagtctgggatgccttggggtttagactttccttgagaattgttgatatcctactgtggagaattaaaaagtgcaggaaaaataactttacattaaaatgttatgatttaaaaaaattttccagtctctaattttaatagcctttagagtattaagatgcttctttgattaatgtccttaaactgaaactataaattactccacaattgtaaagctccaatgaagttggtttgcagttttaacactactttttaaaaaaataactttattgaactatatataccataacattcttcattctttttatttcacaatattcacccattgtaagtgattccattatttttagtaaatttatatatttagaacattttcaacacactaaaacatttcctcatgccaatttgcagtcaatcctcactcccacttctggctccaggtaactactaatctactttctgtctctatagtttgcctttcctagaactttcatataaatggaatcatgaagtacgtaatcatttgtgcttgagttctttcacttagcataacgtttttgatgttcagccatgttgttgcacggctcagaagttcatttatctttattgctgggtgatactccattgtgtggatataccgcattttgtttatccattcaccatctgatggatgtttgtattgtttccagtgttaagtgattgtgaataatgctgctgtgaacatttgcatataagtcttttgtggagccatgttttcatttctcttggttaaatacctaggactgaaattgctcagttgtatagtgtgtatatatttaactttttaagaaactaccaaactgttttccagagcagtggcatcatattacattcccactagcaacataggagagttctaattttctgatatcatcaccaacacttggtattgtcagtcttttttttgagatagtctcactccattgcccaggctggagtgcagtggcatgatctcaactccctgcaacctccatcttctgggttcaagtgattctcctgcctcagcctcccaagtagctgggattacgggtgtgtgccaccatgcctggctaatttttgtattattattattattattattattattattattattttgagatggagtcttgcactgtcacccaggctggagtgcaatggcgtaatctcggcttactccagctgccgcctccagggttcaagcaattctcctgcctcagcctcctgagtagctgagattacaggcatccgccaccacacctggctgatttttttttttttttgtatttttagtagagacggggtttcaccatgttggtcaggctggtctcgaactcctgacctcgtgatctgcctgccttggcctcccaaagtgctgggattacaggcgtgagccaccacgcccagcctaatttttgtatttttagtagagatgggttttcaccatgttggtcaggctggtctcaaactcctgatctcaagtgatccgcccacctcagcctcccaaagtgctgggattacaagcatgagccaccatgcccagccttgtgagtctttttgatcatagccattatagttggtatgtagaagtatcttgttaggactttggtttgcattttgttaataataattaatgatgttgaacagcttttcatgtgtttattagacagtcacatttttctttgataaaatgactattcaaatctcatactcatttttaaattgggttgtttgtcatttattgatttgtaagcattggttttgtgattttcttattttgttgaggtagcagacttcacttgggggaaggcgtagagtttttgtttttggtttcatatacttcctcttatttttgattttggaactagtacagcggaacgaattctccaacccaagagaaattagttttgccaagtatttactgaaatggttcatggagtagaagagaaagactaccaggtgaggggtgctcatgcctggggctctggcattgcccagggctgtgagaatccactgaaccctctgccaggggcatttccaacttgaagattgtcttccagtagggttttctaaccacctattctgcccagtgtctggagagtgtttctttttttccatttatttttagttagtaaataccttttgaatccctgtagcactatgttagctgtggtgagaaatgccctataaagtaagacatggtctttgtccttgaaagaagagcgcataggcaaacatggagcaatgcaatgagatacatgactaagtgcagagtgactggttatattcacaatgccaggaagagcttgcttgaggcagttgagtaatccctcaaaaatcattattggattaagggtcgatcacctgggtaagcttcccagtgccagtctacaaaaggcactaaggcaaaggggaaaaaaatggcatttttatttttattttattttattttttcccaagacggagttttgctcttgttgcccaggctagagtgaagtggcacgatctcagctcaccgcaacctctgcctcccaggttcaagcaattctcctgcctcagcctccccagtagctggaattacaggcatgcaccaccacacccagctaattttgtatttttagtagagacaggatttctccatgttggtcaggctggtctcaaactcctgaccttaggcgatccacccgccttggcctcccaaagtgctgggattacaggcgagagccaccgtgcctggcagcaaaaatgtgttaacaggatccccctcataaaacgttttgtgtgtttgaatgagacacttgcagcacaaggggcccggaaggggcttcctctaagagctggtgaattattgcttccagtttactgctgcacatttgttttgttgagtagggaacatgagcttgacatcagagataaaatgagtggggccccactcgtcccgggtgcacttcccctctttggtgggttgctgagaaggtggcactgcagagagtgggtgctgcctgaaagctgaggaaaggggcattcctgagagctggaagggtcccagaagacctcttggaaaaggtgggttggtcttcaactgggcccagaagagggggtaggatttaaataattgaaaaggaagacatgggaggctctatgatataaagtcctcctcaaggaaccactggttctgcgagataaactgtgtggcttgcagttgacctgctagagcaaagttagaatggtttaagaatgtctgaaattctacaaatacttttcttcatcagcagtaagtgtcacttgcatctttctttcccttcgtatctcaaatggtgacagccacaaatgacagagctctggggtcagtcaaggcaaacagcttgctggagtgttggaaaggaccctgttgagaggagcccaaatggccgccttagagggcgtgggaagaactgcaaaagttgattcagctagtaatgctgtcaagacagctctgtgtctgatggagtcaggggcatgctatggtaaacagagtcagctgttgagaggatgccttgaagggtgcccagcccctggtttggtgcttacatccgatggtggtgggagcacctgttctcttgttatacagttgagacctgatggtgcaagggtcagggctggctgcagcaataatttactagatgagcaaggatgcaataatctccttggagaaggacatttgcatatgacatgtggacatgcctctcccatctttcatggtgggtggggctacaaactctggatttgtgtcactggtgtttcaaatccctttctcacctccctttctcctccctttctcacctgtcagcattcagaagtgagagctcatggaaatgatgattgtgaggctctctcagagtagtctgccatcttgggagatggtttgaggaagaggccacagtggtggaatgaatagttaactcttgacttgggatccagaagtcagacaacagagccttgcaaagttactacgctggctaggcttttaaaagatccctagatgtgacaaaaattgtctatcttcattttttctatttcaaaaggaaaagttccttggctaatttgatgtcattctggtgaaagtaaagtgatgctcctgaaggctttttttggtcaatggaaaaggcagtttgaagaggctgtcccatcagacttcagaaagctggaggcactacagaaatgggtgtgtgggcactgcccggggttgaatccttggctggccatgtgctatgtgggtgtgggctcctcacttaactctttgaagccccagtttctttatctgtataatggggataataaaagtacccatctcagaaggttgttgacctaaacagggctttgtttaaaatgaggactcaataaatatgagaatcttgcttaatcagaacttattatggtgaactacagtccatttatgattttccttgaacaaagatttattgagtgccagctacataccagatgctctctgggtctgtgctatgcagtatggtagccattagccacatgtggctgcttaaatttacataaaactaaataaaatgaaaaatgcagttttgatgtggtttggctgtgtccccgctaaaatctcaacttgaattgtatctcccagaattcccatgtgttgtgggagggacccagggggagttaactgaatcatgggggccggtctttcctgtgctattctggtgatagtgaataagtctcacgagatctgatgggtttatcaggggtttccacttttctgtctccctcattttctcttgctgccaccatgtaagaagtgcttttcacctccccccatgattccgaggcctccccagccacatggaactgtaagtccaattaaacctctttttcttcccagtcttgggtatgtctttatcagcagcttgaaaacagactaatacagtttcctcagttgtcctagccacatttcaagcactcaaaggccacatggggctggctggtagctaccatattggaccatgcaacatagaatatatccatcattgcagaaagttctactggacagcattaatggatatagcaatgggcaaatcagtcacttatgtgagatccaaacatggatttttgagcaaccccaacctgtgggtgtgtttcattttctcctgggaatgtgttgatagtctccaccttgggctatgggtgtctcaatactaattagtagaggtttaacaaggtctgggtgctgctttctggatttattagtaaggactctattattaatgagaagaagatgtgctgtgggaagtttcctaaattctttattagacatagggactgagcaatgagataaatgacagtgcccctccctgctccacccgccttccctcaggtttattacaggactttaggtagcagatggcacggacctgggtggggtgatgccagggcaggaattctgcctttgctcatgggtagcatcttccttaaccctctcagccatcctctcggggaggtaagaaagacattttccctcctcaaagcaccaagaagcaaagggtcttagtagatggcccaggaaggtggtgaggggaaggaagtatatgccaggcctctttgtcctgcaagaactttcaagaacacctggcagctagctcctgaggacctgggccagggggaggaattttgacttcagagtaaggtgctttctgccctactgccaacatgctgtgcagttccatgggcaatggggtttccgactttattcctcctctctccactcccttgtcctttccttcagccgaggggagaggctacataaatactgaagcatgaaacctcaactaatacgtacttactgttttgctaattattattgctttttttttctttcgagtcccattaatgttgtgaaagccacatccatctgtgtgagcaatctttagggaactgggactgctaagttccagcttgtgggggcttggagggagaggtaagtgtgcatttgtgagagtgtgagtgcacacacactacagtgtgctgcccacagaatgtctcttgactgtagtcaagggcaaagtaatgattttagagtacttgttatttaaatgtgtccctggcaggctcttcttatctcccacatgaatatgaataatcaaaagtgggtggtagaaaatgagatgtgttcctcttctctgtctcttctccctttccaacagaaccaggacatcagaggaagaaaatcagcagacagaaaaatactggggaaaaaaaaatgccacgtggttctgttcagctgagcttctgctccctccagcacccccacatgggacatttgtttaccccccacgatgctgctcttggagagtcccaggggacaggtttcaagcccttagggatgcagcctgtctaacttaatatgcacagccgttcacatccagggcacagaggcagcctggctttccctggaggcccacggggaccacaatgctgcatttgtctgtggaactgagatttagctgcacattcttgcctgaatgcagcgggcctccagccacagcctgctggcatgggggattccaggagggatgtgcttcatgagccggcaattgcccttctttccagtccccagacccagtcaagattacagatagatgcgttcatcgcgcgcaggtgctggggaagccagtgggacatcactggctacattcaccaacaggattttccaactgcagtatttatcggtttttcaaacgaattcaacatctgtattcctcacccatttactgagtggctacaatgtgtaaggaaatattctcagtcatggggagttagaaaaggtcaaaggcatataagatatggcatgtgctctgagagaactcatcatctatccagaacctactcatcacttttggaaagagaagagaaactagcattctatggagtacttaccatgtgccagatttggagtgagacatagtacgagtgttactcatttacgtctcatggccaacctccaatgtggacatttagcatctccatcttacaagtgagaaatttcactgtagagaggttaaatatcatgtgtcattgattctgtgacatgtattattttcacatttgaacatctgaaatatagatatgtctaaaagggcttttctttcttggtagtaagataactgtaggtctttgcagtagtgtcttagattatgtgaaatatggtattttggcaagtgtacatggctaagaacaagtggaatcagaattcaacttaagtttgcttgactccaaagcttatgtgttttccagtataatgtgctgcagtatcaatggtctgtatgaacaaaggccatatcatttttattgacaaagtatagaaacggggaaatggtgactgaactggaacttgcatcatctaattccataactgaggagacaatagcctggggactgcatgtatcccacaggatgttaaaaaattgagaaaatgttatttcatgatcttcacttctctgttgattataacttatttttgaagaggctaaaataaatggcaaactcttgtatggataagatataaaaggcgagtgtgatgtattcctccatctgttctggtgtgctccaggctgagtgtggtgctgttaccaacagggattctttaggggatgtgaccagtggcctctttactgttctggagggccataataggagacacaggccaactccctctcctacataactgagttctgggaagtccccaagagcaggcccatgtgtgtttattattgtcacaatgccctgtggccagcacttgcagagaagaagcaaggtctgttgaattccacgaatgacctggattcagacagcagtagcaagggctccataggggaggaaagagctgatcctgctgctggcttttgcacaccataggcttgatctgcctggctcccatatgcttaaacacatttggttccataatgggctttgattaagtcattttcccaagcagctgatgtgaaaagcagagaactggaagggggattggtcaggggggccttgatatctcagatgggaggctgtggggaatagtggaaagagaacactgctggtaatcagaacacccaggacaggctggaagctccctctctcctaacacccaggggaaaccaagtctcagaggaactgagtggcttatccaggttgtcacagctgatcactgacagctaagtcaggaccaaaccgaggtctctgcagagttgtgcctattaccttatgaggttgtttaatcactggggaactgtgcttttccaacaatgaagaaaacgaggcggttgacttcttggaagtttctgaaggaaataacctaaaataacaacaatgaaaacacctacatgcacaatagtgttcagtgaagccttatttgtgattactgaaacactggaaacaacataaatgttccacagtaggagaacagttaggtaaatatgataaatataattgataaaatactaaatagccattagaattatgtgtaggaagactagcaatataggaaattttcttatgataatttcctatattttaggtaaagaaaaaggacacagaagcatttgtatattatgatgatagccttgtttaaaatcacacacacgcacacacacctagaaaattaaagtctggtaaggagcccaaatcctaatgatgtttgttatcaaataatgggattataaatttttttcttctctaaatttcttgttttaaaaaaatatcataatgaaaaaatatatttttcaaaagaaagagacaataagatgggaaaaaatggtttggttggggtgactctccagttcttatattctgtgatcctttggctctggactggctgttcccagctgcaggtacttgtttttcatagggcaaaaatgagtttagccttggccaaaggaaaaaggcagtcttctaggaagtggaagtggttcaataaaggtctagggactctcccgttgtttaggagagtaattgggcatgactctgaatttggggagaaaccatagactcttggctgcagggtaatttatttgtatttctaaccttgtgtgcccaaaacccaaacaggtcagaaacgaatggaacggtcctatcatttttctctgcctcctgcatttgccccagggtgggaagtgaagctcttgttggcttcattcagccttccaaagaaaatgcgccattcagccttccaaagaaaatgtacaattgcaacatttccattttttatttccccttttctttgcaggcaggtttcttttcagtcaaacctgtgttggtataaatggttagcagttttagaaccctgggcctgagaaaattcatcaccatctgcttgaatctctttatgggctgtgtgtgtggtggtgtgcagccaaaagggtgttggccagagagctggacaggcggttcttgtcctgacaccatactaattagcggtgtgaccttgggcaagtgacttcaccctgctagactttcatttcgttacctatataacacaggcaccagagtcaatttttaagagttccttttagctcccaccttttatgtttattctaataactcactttaaaagcttggtattgacttagccaaattatttaatttggtaaatatttttatgtgctgttttattatgactgctgtcatatggttggttcacttggcttctgctattgcttcttttttttttttgaaatcagttacacaaatatacacagctgtcctttataccagaaagcattctttcttttatctgtaagggaggagatgtattccagggcaaagtagcatggctcattgttggttagtgggacggctgcttgccagtagtgtgtgtgtatgtatacgtgtgtgtatgtgtgcatatgtgtatgtgtgtgcccatgggtgtgtgtgcacatctgcccaatgtgtcatgccttgtttttttcccctctttaatggcactgctgagaacacatctgcatgaataactgctaataccaactgtcaagctagcaaagcagtggggttggatataattttctagcataaatttatcagcacagtgggcgtttggggttagctccttctgcagatgcctcgtgaagcaggttctggtccactgcaccaaggaaagatgtagttttgccaaagaagaagtactgtgccatcagcagcagatcaaggggatattatccatcccaagcaactgcaggtcagaaattgtatcatggacagttcacaggaggccacagggagggaggtgattgagaatgtcaccctgtcacacttgagtcactggcgggtacagccactttttatgtgggtgcctgccactgacaggctccctcggcatgtagtcacccttcttcaaaggtagaggatgtgacattagtaatctgtgtgggtggaaagcctgttgttactggtcataaccctgatggaagaattagtggacctcaccaggccagtataaatgtaaaacccagagagggtcttgaaaggaaaagaaatctgtttactttacttctctcatcttttctgtctattatcttctaactcagatcaaaactccatgccatatggcaataaagagaaggcactataccatcatcttgtaccttccaaagaagtgacataaccaaagcatcccaggattagcagagaatgaaggagccagtggagacttgcctgtatccacatgggacatttttgggtcctccgagatcagaggtggcacccatctgccctagcagtaactttactcttgatgtaaatttgtcaaatttggtgtttgacagtcattttaaatgagaagtgttcctaagatccaacctaggctgagtcatttcttttatttctagagaatcctgctggttcctccctacagaggagatatttggtatgatgacagtttcctgtgtcagctgggtgttggatgacccaggtttcattataaatgtgctgatagtgcacatggatctttttcctctttccttaaaacatttttagggagacaggaaaccttggtaggattctcattcctgatactaactcactttatgaccttaacaggggtccctcagcttcactgggctcaattctccttctaagacaaggggtttgttacggtggttctcaggcttggctatgagttaggaacacctgggagggtgtcaaacatcctgaagcccaggccgcaccccagaccggttacatcagcgtctctgagggtaggaactaggtatacatattttttaaagctcctcaatgttaagaagcacttgtttacagcagtgctgcttaaattttaatgtgcatgtgaatcacctaggcatctgttaaaatgcagattctgattctgtaggtctggggtggagcctgagattctgcatgtctagcaagcttccagggcatgctgatgctgctggttcacggaccaagctttgagcaacaagatttagaatctaagctttagatcaagcttgtccaacccctgcccgtgggatgcatgtggcccaggatagctctgaatgcagcccaacacacattcataaactttcttaaaacattatgaaaattttttgcattttttttttttagctcatcagctattgttgtattttatatgtggcccaagacaattcttccaatgtggcccagggaagccaaaagattggacacccctgctttagatgatcaattaatgatagtacaaagcttagtaattgtttacaaaaatgtggcacaagaaatatactatgagaatgagcacagaagaagaagcaattatatttggcagaggaaatcaggtgtggctgcacagaggaggtagcatttcagagagccttgaatgacgaggaaggtagtagtcaaggaaacttctgtttcttcagagaaacagaaccaaaaggatacacacacacacacacacacacacacacacacacggaaagaggaagagagggtgcagggaagccctgcagggtagacctggccagtgggctagagacctaaagaaaagttaatgttgcagttcaagtccaaagcaatctgctggcggaattcctcctcttcagaagaaatcggtttgtttcttgtaaagccttcaactgattggatgaggcccagcacattatacagggtgtctgctttacttagtatctactgatataaatgttaatctcatttaaaaaatactttcacaggagcatccggaaaagtgtgtcacccaatatctggctgttgtggcttagccaagttgatatattgaaattaaccatcacaatgagggaaagagtatttcagtttcttctgacctctaagaactatagaactatagctggacagggaggagcttgtggtcctagggagcaagaatgatttctggacactgttgacattctaacaagtctttgttctgtggtaaggatagaagggcaggacttcacaacccgtagcatggatgctggctcagctgtggtctccctgcccactgccttctgcccttacttgtgctgggggcactggaacccagatgaacgtctggagccttccacttgcctggctgtgtgtccagaggaaatgggtttacagggaagagtgcatggaaaatcaggtctgcaggaaaacccatgtgtggcactgtggagcagacactttgcctcactctctcgtgatctgagtcatttgggaaaggggaaaatgagtgggggtaaatcacccaaacatctgcaggccagcagagtaactttttctgaccctgacttacagggagaacaaattttatattatgatccggtatatacgtatatatggtttgttttttgttgtatgttgtttgtaaagccagtgattaagtttgaggtttggcaggtaggatttgtttaaattccagcagatggaactagaaaagacccatgatttcactgacctcaagaccctgctggatagatatatatttatctttgtatttatgtactggatcataattagtgtatatagtgtacctatatagcatatatatactgtatcagtgttaaaaaatttacagataacctacgtatgtatgtatgaatataaataaaaataaacataaggtttatgacatgatgcttacccttgtttcattggcacgtgaaatgctatcgtattttctttctttcatttcattaacaagaagaggaaaagctggctgtgacccactgaactgatttcaccatgcttaatggacggataactgtgggttaaagaaaagacccacaccccggtgacgtggaaagagcttgtgatctggagcagtcctgtccatagacgtttccaagaccatgaaaatattctgttttgcgctgtccaacatggtagccactggccccgtatggctactgagcatatgaactgaggccagtgtgaatgaggagctggattttaaattgtctttcattttaattaatttgtggctcctgtgatggacagcacagatctgggttgctgccctgtgcctgcccctaactcgctaattggcagtgagacccctttttccaagtgcagcatctgtaaactgggaggccagactcagtcatctccccaggggctgccagccccacccttctgcattccggtggtctggaaagccaggctttgggctttcagctgggcatggagttaattaagtaccctgggcggtgtcacagataatgtgctttgcatttttaaatgctctttaagaagctgggtccttcttccctttcagttgcttaattgctcacctgtatttcttgacagtttgaaaagagagctgctctctgcctcgtgaaatcttagcagcccatcttcgctgacttgctgagctctgggatggcatttgcaacctgaacaggagatgtttcacttttatctcgctgttgctttcttctcaaggataagaactctctcagccgagaggcagaatgttacgaacggagatgacagtggcagtttggtgcataggttaaccatcgggttgggtttagtttgtttttgttgtgtgttgtttgtaaagccagtaattctgttggaggtttggcggataggatttgtttaaattccagcagctggaactagaaaagacctatgatttcactgacctcaggaccctgctgggaacattaaggggcccaggaaatgatgggggaggggtgatttcctcctcactgtcagcaagaagaaaagtaatgatagtcaaccttgacagaggaggtgggtttggcagactgtatcacttggcttatttgacttctcagaaagcacttccttctcccaggtgctcacagttgaccggactgaagatgaattgggtgtgaggctcacacagcccattgatttgtgctgagcccagaagtgatctgagacgttctgacaattccttgtggctctgatgggtggggtacaaataggggcagaaatcctaggaagaaccctaatttatgacattcacaaattgggaacaaaaatatccattccctgattagaatgaagcggtccaaggttgcgaggtccttgtttgcttcttattctctctgtatagagataatgaggggcattttaaaaaatagtgcaatacttttgaagacacactatatcagatccttcctcacccgcgacataaatgcaaaccccatggtatttgccatgtgccaagcatctcacttaattcttaccactacagtctgaggaagtgactcttcacttgcacatggagaaaccgagaggttaaggaccttgcccagcgttacacaactaggagctggtggtgtcagagcttgactcccagcatttgtgctgttgcgctactctgctgcctctcagcttgaggcctgaccagctggaggtggcctgctctgccccagggcattggtgactcattgcaccatgcttggtacacagggtgcaagtggcgttcttggtgcctatcactctgagaggtgggaaccctggtcctccacaatccagctctcttggtagaggctgagcctggctcgtgtgttttctggaaagagctgagcctggggtgaggtgggatgatggagaaagagcctcctttctctctgaagtcagaggcaaggagttcatgtgagggagagagtgaaccctggtacacaccagcttaagggaaaaacaccagcacaccactcacagatgcagctgacagcagacagccacagaggtgaccgggcaatgtgggggcagagtggtgccaccctgctgcggagggtggaaggtatgagctgacagtggatgtaaaaacaagcgggggccggcagcttgggctcagccaactgaggccatggtgatggtgacaagtctgcactggaggaatcccagctgtggtagttgacttgggagccccagcatgtttcagatggcattggagcaagggtctgtgtggggctgggcctgtaaaggctggatgcctcccttccccttcaaactcagtgtccctccttctccctagcagctctggctcaatgacactacaaagagggccgagggctgctcctgatcaagagagcagcacacttactgaggacccaccatgcacaagataccccaccaagggctgtgaaggagactgcaaacatggtgaggtggattctgggcttctagggagtcagtgtggaaggttaaaagtagacagtacacacactcataacccatgccaatagacaaagatacatcttagacagtcttgtgctgctgtaacagaagagcacaggccagataattgatagcaaacagaaatgtatttttcacagttctggaagactggagtccaggaccaaggtgccagcatctggtgtctgctgagggccttcttgaggtgtcctcacctggcagaatagggcaaaaattggcaaactctgtgtcctcacatggtggaagggcagaagagagtagacttactcctgcaaaccctttttaaaaaaatgttattttattttaagttctggaatacgtatgcaggacatgcagatttgttacataggtgaatgtgtgccatggtggtttgctgtacctatcaacccgtcacctaggtattaatatgcattagatatttatcttgcatgcattagatatttatcctgatacactccctctccccacacccccaacaggccccggtgtgtgttgttcccctccctgtgtccatgtgttctcattattcagctcccacttataagttagaacatgtagtgtttgcttttctgttcacaggaacagaagtttgctgagaatgatggcttccagctccatccatgtttctgcaaaggacatgatcttgatcctttttatggctgcatagtattccatggtgtatatgtaccacattttctttatccagtctatcattgatggggatttgggttgattccgtgtctttgctattgtgaatagtgttgcagtaaacatatgcatgcatgtatctttataacaatgatttatattcctttgggtatatacctagtaatgggattgctgggccaaatggtatttctggctctagattcttgaggaatcaccacagtgtcttccacaatggttgagctaatttacattcccatcaacagtgtaaaagtgttcctatttctccacagccttgccggcatctgttatttcttgactttttatttttattttttgagatgaagtctcacattgtctcccaagccggagtgcagtggcgtgatctcggctcactgtaacctccgcctcctgagttcaagtgattctcctgcctcagcctccccagtagctgggattacaggcacacaacaccatgcccagttaatttttatatttttagtagagatggggtttcaccatgttggccaggctgatcttgaactcctgacttcaggtgatctgcccacctcagcctcccaaagtgctgggattacaggtgtgagccaccatgcctgtaatgagcctcttgactttttaataatcaccattctgactggcatgagatggtatctcattgtggttttgatttgcatttctctaacgatcagtgatgttgagctttttttcatatgtttgttggctgcataaatgtcctcttttgagaagtgtctgtttatgtcctttgcctactttttgatggggttgtttttttcttataaatttaagttccttgtaggttctggatattaaacctttgtcagatgggtagattgcaaaaattttttcccattctgtaggttgtctgtttgctctgatgatagtttcttttgctgtgtagaagctctttagtttaattagatcccatttgtcaatttttgcttttgttgcaattgcttttggcagtttcatcataaaatctttgcccatgcctatatccttaatggtattgcttagattttcttctagggtttttatggttttggattttatatttaagtctttaatccatcttgagttaatttttgtgtaaggtgtaaggaaggggtccagtttcagttttctgcatatggctagccagttttcccagcaccatttataaaatagggaatcctttccccattgcttgtttttgtcaggtttgtcgaagattagatggttggaaatgtgtggtcttatttctgagatctctattctgttccattggtctatgtgtctattttgatgccagtaccactgcaagctcttttgatagcagcattaacccactcatcagagcagagcccttgtggccctggcacctaccgttagacctcacctcccaacacttttgcattggggattaagtttccaattcatatattttggagggcacacaaacattcaaaccacagcaagataggacaaaatctctggatcctttctgcatgtgcctttcttcttgctgtccacctgcctttgataaacaaacacaggcattatctatcagttaccattctggctgttctttaggcttctcttctcactattccatcatcacttcttacaagaaatcatgccccaaatgctcttcagccccctctcactttttttttttttttttttttttttttttgctcaaggggaaatggagtctttttgctggctgccttagtgacaataccacctgcacaaagcactttcatatcagcatatttttgtccctctaaggtcccaacaaccctataatgcaggtattagtaccgttttgtagaagaggaaaatggggcttagagagtttaggtcacttgttgaaggtcacacagatagtacaggaagggctctgggactgaaatcaaggtcagtgtgcctcctccaccatgcgagatcacctgatgagttcagtggagagcattattgattacatcttcatttcaaaggggtttggaaatagtatataaaacattgtataatacaggctggacgtgggggcttgtgcttgtaatcccagcactttgggaagccaagcgggggcggatcacaaggtcaggagttcaagacaagcctggccaacatggtgaaaccgtgtctctactaaaaatacaaaaattagctgggcatggtggcaggtgcctttaatcccagctactcgggaggctggggcaggagaatcacttgaaccgaggaggcagatgttgcagttagctgagattgcaccactgcactccagcctgggcaacagagctagaccccatctcaaacaacaacaacaacaacaacaacaacaaaaattgtataattcaaagagggtttaaaattatggatgaggaaaacagggcaaagggactaggaaacagtacttttgcattttaattgtcattagttcaaacatgagcttttggatgaggtgagacttctgggttgatgagaaggaatgaaataatccttttgagccactgcctccaggcagaggtccaggcatcgccctgggacctgtgctgttggctggatagaaaatgcttcttgatttcagctgcaggctgccgctggaacgggtcaagcgaatgatgaagagcacactgagccaagccagtggaagcccccaagttcatttttcttgtaagaacaggccggcagccactttcaaagaacatgtgtcatagagtctagtttagaactgcgttaaggatgacttgcttactctgaatcacatccaactgcagagctttgttatagatggttgttggcacttagagggaaatacccggtctctatcaataatcagtcatgctctggcacaagagaagcagcactgagtggggcattatccgaccacgttctagtcgcagctccatcatccctgggtgtgtgacatgtcgggatcagtgtctctcaaagtgtatctgaggaccacttcaggaggaccctgggttgggggtaagagggagactctgggtcctgccccggaatattgggtgctcctggtgctgtgtgagccaagtttcttggttggctctctgcttatggcaggctgatttctcatcatccccaaatgtttattgagtgcctgttatctagagggcacagtttgggatattgtagaactttctagacaccatccctccattttagactctggaaaatttcagaaagtccaggtcacctctcaaattcctggcaggtgcccatttgcttctggcaaggtctgactcaggatccacaggtgggattgttttctgggaaggttaagctccttttgcagtctgttttcactttccgtgttgggcagatgtggacctgctctgctagctgtgggctgtgggcagcattgcccatttgcttcctgtttatgagagaaaagccccatctttgattttcccaggtgggccactgaaatcacctgaatgctctgaaactgtccctgacttctttgctcaggtgcccccgagttgtgaagtggcttagctcaaagcctcctgcagggcaccacagtctgtaggaggtctcttgttcttatatgaaaagctcacgtgaactttctgttctactcaataatgtccctgtgattgtctgaataggaaggttttcattcccaggaggctcagacctcctggctcccaagacagatctgtgcggggccaagacgagcagcgtgcaggccgcccactctatatggtgcagccctaggaggctgtatgtcaggacctatcatctgttcaggtttaatcacctgcagtaagagagcagtctaatctgtctatatatttatttagattcttgctttagtctagaaaggattagaggtgaccgtgatgagtagttcaaaaattaacctgaatttaatgggcaaaagaaagtggaataagcttgcacctgtagtcatgacaatattcatgagaaatttttaaaagctaaaggaggccaagtgtggtggctcacacctgtaatcccagcactttgggaagtcgaggcgggtggatcacttgaactcaggagtttgagaccagcctgggcaacatggcaaaaccccgtctctgcaaaaaatacaaaagtcagccgggcgtggtggtggatgcctgtagtcccagctactcaggaggctgagatgggaagatcacttgagcccaggaggtggacactgcagtaagccaagatcatgccattgcactccagcctggcatgagagagggtgacagagccagaccctgtctcaaaaaataaaagataaaaactttaaaaagctaaaggagtctcttagaagcctcatttcctttcaaccctctgagatcttgcttcaaggtagggctgttgcactttaaaacccacctctgagacccatgtccttcttgggatgatggaacttagccaaatgaggagagagcccccagcctgtcaggcctgctgtagcaaaatcatgccccgcaatcttgtctgaataaacagcagtcaagacagaggtatgcctctagtaaactcccatcctgtctattggacaatgctgtaccaagagggctgacgaggccagtgttaaactgtgaccgactgggagttgaggatgctccgggtaatgagtccccctccctgttagcagagttccagtaggtgggtgttccagtgcctaagtgcaggcaagtcacggggcaaggtgaccttctgtgcctgtcatgatctaatagagctctttgtgtgggtgtctgtgcttaatttggctgaaacatttatttctcttctgaatgggcttccttgtttcacacagaaagttggcccatgtggggtgctgctgacaggcagtagcagggcgtctggtgggctaccgttttggcttaatgtttactcctttgcctgcagttttaggcatccctctgtcaaactgtcaacccttggtgaatatcataggattttctctttagaataacctgtgttcgcatcccaggtgtttttataattcaattcaaaccaatgacaaggtggctttcccattcgtggtagccacccggctggggaccattccccacagtttctgtgagtccagagttggcttcactctcaggaaacaaaatccctgatgggcatctggaattaccaaggtgatttagtgatagggacttctaaaagaactaaccccaagcacaaaactcagttcgggttgggtcagaaacctgacccaccccgcacctctctgggtgtattgctcactgccaggctttggggctgtttcaggaggctatgttcttacagggacaagagccagtgtgtgtgcgtgtgtgggtgtgtgtgtttgtgtgtagagccctggtgtgtcaggcacacgtgcagagagatttagatcagcagacctcagatgacgaaaccctaaactctagcggaagcaactgcatcagatggtggaaaatctcatccaaatgcctttacagtgtctttcaggtttttgatatcaagacaaccagaaatttgctgtgagtgacagccaggaggtgacgctaatatcctggggtctgaagattcctcccctccctctacgaaactcttgctctggtgtccatttgtggggccacctctctccccctcttgcagcccacagaaggactgggaagcattgacagtggtccccagctgccacctgctgtctgtgactcatgcactgtctgtgggagggtggagaatatcatcagtgggttgcggggcagagagtgggaagtgtctgctttgtggctgatgtgtgagtgtgggaacatgtgtgctcctggacgggagtggtggcattgctcattctgaggagctggcgggtagcatggaaatgtgtcttcacttggttttttgggtttctagtttccttttttctttttttaagacatagctactgaaaggccaggaagtaggacttgggggcatgccagtgagttggaagccgcattaatgtcctgtatctttagctcttcagtccaacaaaggtgcaattattatgttatgcacatgccttctgcaggattatgtattggcattgctgattctagctaatgtcttttagcagtttgatgggcttatattagtttccgggagttgccgtaacaaagtaccatcagctgggtggcttaaacaacagaaattaatttttttcggttctggaggctggaagctggaggtatcaaggtgtgggcagggctggttccttctgagggctgtgagggagtctgttccagccctgtcctggcttctgctggcctgccggcagtctctgatgctccttggcctgaggatgcatcacctcgtctctgctttcatgttcagtggggttctgcctgtgtgcatgcctgtgtctgaatttttcctttatataggtggcaccagtcatattggattagggccaaccctcatgacttcatcctgactaattacatctgccacaactctgtttccaaataaggtcacattcacaggtactggaagtgaggactgtgacatcttttggggagacacaattcaacccataatgaaagcaaaagggggttttgtgttccccttatgtgagaggtcatgtgatcataggttatggaggctgatggcctgggattgacagctgccacttactagctgtgtgtctttaggcaacttgcctgtcttgtttccatatcagtaaaatgaacaaattttaaaatatggttgacaggttataatttaatacacataaagttctttaaagaatacttcgcatattgtagctttcactaaatctaagttgcttctgtcacttctgctactacctctatttgacttgcttgtttaaagttatgggaatatagttttattgaggatgctttaaaaagggtgaattgaaaggaataaggacattgccacctgaatttttagatttatgtatcttcaaatgactcaataattgctcactctaggaaatctgcaactatgcattgtgttttgaatactgaaaagaaattatctttgaaaccgcatttattcatttgataaacatttattcaagcctcgctgtacatgaaacactttgctaggtagtgaggtgcatacaaaaatgactgtgataatagctctgggttttaaagagcttgcagcccagtgagagacagagacataaagtgatgcaataatagaaggtaacaggcgttcttcaaaatgctgcacctggatcgacctggaagcaggatggaaatttcaaaagaacccaaggagataaacacagttccttatcttcaattctgaatttgaaaaacaaaacgaaatgaacctttgaaaattgaattctttctttgataggtttggtgcaaactcaattgcttataaaacctgagctgaactgatgtgaggcaatagttttatcttctttcccggcatgtgaatgttcacaaagtttgctgaaaaacaccagggatggtacgtaacatccagtaaatgcgtcaccagattccctttcacatctggcccagaatccctggaaaagggatggtgggactgtctaactagatattttacagccaaggaacactgagcttcagaggagtcagacggtgtgctccagtcccaaagcttgggagcagtgcgatcttgtctttagtctcctttcatctggaacacttccacaagctttatttgtcatacagagtgaagaagctaagtctgcctgcttggctcagccgatcctaatggtaaatgttaggcctgctttgcttacaagtcacagaagcctgcttgaggagtagacaaaaagagggcaaggtgggcaaggtatgattaggatatggggtgctctggttggaaagtttgtatccttgcaaaatttatatgttgctgtgaggacacagcgagaaggcgccccctgtaaacaggaagggagcgagccctcaccagatgccgaatctgcgggcaccttgatcttagacttcccaactccagaactgtgagctacaactgcctgttgttcataaaccacccagtttatggtgttttgttataacagccaggatggatgccattagtccatccattagtctgaaatacttcaagtgtgtggttcctaagaactggcatgttttcttacataaccacaggagaatgatcaactttagtatttttaatatcgatgcaatgcttttatccaattcaccgtccatatgccagtgtctccagttgacccactacagcatcctccccctctcaatatgatccagtctcgggtcaggcattgcatttgattggatctcatggagccccagacagagccgtggcttagcctcaggaaggatcagaatcagggacacagggaacccaggagttttcttcctttgcctcccacctgagcatctctctttgaccattcactttttctgcttcccagtccacgtgatagaaaacagctactacccgccaaacctaactttttatctcctgaatttaagacagtgctgagctgaactggagccttttaaatccaatccaaatccccatgtgtctgcttcccgtttgcatgaggatggaaaattgtggtggtgagtggggccctagtcaaagaaaacatgacatggaacacacacatgaatgcagtggaaaccctcactcccgtggtgcatttgacacaggatcattcgtttgccgaccttaacctggtgtccagcgtgtctttggggtgagcattcccaaccctggtccttgccaccttctgcaattgctgacttgcccgcctgctcccctgagatgatggtgcatcctgtttgcctggggccaaggcaagctgcttggcctttggccgcccctctcccccaagctactggtttcaaattgatggaccctagagcccccatgccaccacctgcttgacagctactcggagggctttgctgatgaagtctcaagacacctcaaggtgaccctgtgttgatcagagtggactggccctgagcctgtgttctctacaagctctcgtacatcatgactgaactgctggcgatggctccctgacctcaccaggcctggttgcacagccaggccactccttaggctcgggcctccgtgttgctggtctgtttccctcctctcaggcctgtgggtcatggatgagggccgtggatgaaggcctcgtcaatgtcaaagcccttcccatgtttggggccagtagagtctggcggaagagaaaggttttcaaggccagacttagtctgggcaagtcactaaacctcgccacatctgtattccaaggggaatgaaccagatgttctttcagggccctgtggctctaagaaattctgtgatgtcactaaaaactccggcaggagttgcccgaagtgtacaaagaatgagcaccattgcatcacatggggccagcccagaggtgagggctactctaaggtcaaggtgtggtaggaaaccttaacaaggacaaccaatcacaaagcagctgaggcctgggatttacatacctcaccggagtcttgatttattcatcgtgcaggccctaggctgctgtccttataagggcctgcctgcaaagttgacccttggctggtgtctggcaacttaactgataaacagtttccttcgccaatatacaatttttcctaaatcataagatgggcttgctgtgccgaagctgcttgtgcaaacagtatgatttatactgaacactgctttctatttgggagtctggaattttgggacatggtaggcagaggctgcctacatcagcagccccacgataaggtccctgggtgatgagtttctaccgaacttccctggttgacaacacttcacatctgtagccactgctatttgctgggggagttaagcacgtccagtgtgatccactggaagaggactcttgggagcttgggcctggtgtgctccggtcttcatcccatgcaccttctctttgctggttgtgcttcatcctctttcactgtcataactcttagccataggaacagctgtatgctgagtcctgctaccagatcacctcttaccaaacctgggggtgatcttggagaccccaaacacactcatggattttcaaagtgactaagcgcaagtgaagataagtccagtgtaattccctggtgttaattcatgctacagaggattgggcccctctgcctgtgctaaaaggagctttagcttagttaacatctgcaactgtggcgtcatgattacttacgtccccctcagccccacctagaatccaaatgttgtgctgtccattgagaggccagatcatttgtggtctaggagtaaaaaatcacagaaatcttggcctggtttgacattctggaatatggaggaaattctcaggaacagaatttggctggtgtgccttctcacctgggcagctctggcagcgttcttcggaaagagcagcagcagcattccttaattgaatggtggtgacagttctccagaaccaagtcaggaaagccagttagtcttatagaagttgggaaaatttactgctggaggaaatattatttgagaggaagtacaaagtcttaaccttagtgtattagtatgttttcatgctgttgataaagacatatccgagactaggtaatttataaagaaaaagaggtttaatggactcacagttccatgtggctggggaggcctcacagtcatggtggacggcaaaaggcacatcttacatggtggcaggcaaaagagaatgagagccaagcaaaaggagaaacctcttataaaactatcagatcttgtgaggcttattcactaccatgagaacaatatgggggaaaccgccccgatgattcagttatctcccactgggtccttcccacaacacatgggaattatgggaactgcaattcaagatgagatttgggtgaggactcagccaaaccctatcacttagcatacttagagtttctatgagctttgaatagaaaccacataactttttctgaatgctttaggtacccatagagttctgttctgtgaaggcagagttttcgcacccttcatggcaagaactgtgggtctgtaactaaggagaggagagtatgcactgtcatgcttggctgtcgcatcatttatggaccatgagaatgcaacaaaggctgttctttgtttttctttgagatagggtctccctctgtcacctaagctggactacactggcacagtcatagctcactgcagccccaacctcctgggctcaagcaatcctcctacctcagcctcccaagtagctgggactgtaggcatgtgccaccatgcctggctaatttaaaaatgttttttttgtagagacggtgtctcactaggttgcccaggctggtctcaaacccctggtttcaagtgatcctcccaactcagcctcccaaagtgctgggattacaggcaccaaatcagtttttgtttttttgagtagccctttcttcttcttgcagttgccctggattgcccaggtggctctccaagggcagaaggagtcattccacctctctgtattccagcgttaaaattagcccctgttttagagacttttggttctgtctccagagctagggctagaagtcagcagctttaagaacagagcatctcaggaggtacagccagatctctgtccaccaggtttctagaagcatgaccctcagaggctgttttggaaaagtttataaattccttggtggtttagtggtgcgagacactgactttagctgtatgcccaggagctgctgcaaacaacatgcaggcagtaggcagatattgtgcctcccttgacacttatgaggaagactgagtgttgcaatggcatttggaaacttccattttctattcaaatttgttcaccagatccttatcaggtggaagactaataagagcacaaatagtgaaggggacctgaggcttaccctttccttgaggctaaagcaagaaaaggaaaccattggccagccacttttgtcaagcacttcctttgtgcagagaacatgctgtgctctgtgccttataggggtggaggataaacaattgggaggaggggctcccttccagaacatcccatgggctgcatgagagggcaacactgaagccctcaccatcacttgcaagaaatgactgatgggcacttacaaaacaacaggtaaatgaacgagtacattagcgttccatgtataagatgattgtccccagagtcaggtgtggccaattagagaagttgctaagaatgaggtttttgaaggaactgctgaagccagacctttataacaagcatggtcttgttccctgctgcgtcagcttgctccactcctttcttccctgcctctgttcagggcaccacgagtgccccctccatccctccacccaggcacacaccagagacttggaagccatgctagatgtccacctccctcctccctccaaatccaccccaaattctaccacctccattctctccactgtggccagtaatgcccaatgcttccagtgactccatttcaccctcaggatagagttccagccctcctcagccctctgtgcctctttcatcctcacctcctaccctcaaatgtttgaggctttataactctgttctctttacttttttgattgatgccttttccctaatgactttgctttgactggaaaactcttttttttttttttttttttttttttttttttgagaaggagtctcgctctgtcacccaggctggagtgcaattgcacgatctcagctctctgcaacctctacctcccgggtgcaagtgattctcctgcctcagcctcccaagtagctggtattacaggtgcccactaccatgcctggctagctttttttgtatttttagtagagatggggtttcaccatgttgaccaggctggtctcaaactccctaacctcaagtgatctgcctacctcagcctcccaaagtgttggaattacaggcgtgagccactgcacccagcctcagaatatcttaagttcatattttaatatcttaaaggtaaaatgagttcactaggatgggccctgatacaccatgtcggatgttcttataaaaaggggggaatttggacatagacacacagagagagcaccagcacctgacttgcaggctgatgcatctaccagccaaggaatgccaacgattgccagcaaactaccaagagataggagagaggcctggagcagattttcctttacaaccttaagaagcatccagccctgcccacaccttcatctcagatttcagcctctagatctaagacaataactctgtttattgagccacttgctttgtggtcctttcttacagcagtcctaggacactaataagccttctgacaccgatcttctgtgatcttttgggatggtggtgaaatcagcggattgtttattttaacatctaggagatcagataggttccaaaagcatcccttacagatgagcccatttttgccaatacttattgttacttagagctggatggactcagaattggggaaaccatctctgttttggacacctagaagatgggcagagaaatgactggtggggatgaaggatgttgttgctgccagttggtgaaaggagaaaaggctcaaatatgtgcttctgatctctaacatccctttccaccatcagcaggacagatgagtgggatcacatcggcccttaccctttttcttgggatccctgcttccatgcaaggctccccttgctgtagctggtggccacttgcatacatgtgcttggggcagtggatgtggcctacacgtgtgattcgctgccagtgtcaggggtgtgtttgctgacgctgcttgataagccactttaggattagcaggtggccagagtgggcctggtgtatcccttggctgttgctcagactctcccggcttcaccatgtcctgtgtctgaatcccaggctctttccaggcttttcaggatgtggatcctccccacactgtaacaacctccaacctagagatcacagccaccagtcgatataattaatgaccccagtggtcccccgggttctaacacatacagttctctgtcttgatgctttccccctcattctcctggggcagcctgggcatgctggttcttaggattcagttttgggaattgcaagtgtacaggcctgtgtttggaggttttaaaggtgatttgaaacaaattccatttaatgatgtggctatttcaaaagcctgtccctgtcacattagaatccccagagctgcagctttgttaactttcagtttgttattgggctaggaatgggctgtgattattagcaaagtggacagaacaattggttcagactccagcatggtggttttgagatcccgtctccctctgctagtctatttttgaccctgccagcatcatttttttccttttgaggttgaataaacagacattctctaaccttcctcctgccacccagcactctccttctgatcaaggttgacacatttagcccactctgtggtgtgatgctctatgaaaagatcagacctacattgtggcgtccacctgagaggtgtaggacagctgaggttggacgtctggactgtgcaacccagcaggacaagcctgtgtcacacatggccagaagctattgatctcttgaagattagtcctgagttttacttggtttgtgtgtcttctaagtggcagcattaagctttcttgttttagagcaaacctcttgattctgcagaaataagggaaaaaatgttgcctttcttttgaaagcaagcctgttaagaagaacagagatgccagacccagctgtcttttcctcctggttctttggctgtaagaatcttcttcccacttcagaaccatacttggaggggaaagaagccaggcattgccaaatgacgagatctgtttgtccttggctctggataatgtgaaacaagagcttgtttccctaaatagttttaattctatggctattctgatagggaaacggtgggattggatcttggtctcttcagattgagggcccagtacaagtacagaacattattactgtgatcgataggagattatagccatgggcagtctctggaactcatttatatgcatattatttccttagtaatcaaatatgaatctgagaagtggtgctcaacgagcatcaggaaatctggctcctgatgaagacaggagttggtgaacatctgcaagcttggaaggctgccagccgataccttcaccggaatgctaactcctccctcctccctgttcagcctcggcgcctgtggctggctgctgagccctcttcctttgccgtgtttagtccctgccagtgtatgcagaagttggtgtgttactgatcattaatgtggtgttattgccagactggtatttgtattctcaatcaatttcctttagaaggggattcatttaatacttagagggggttgatttttatggtggagctggggagatgaaaagatacatatttaatttttatgtttttaattaacatataaaaatggtatatatcgatcatatacaatgtgttgttttgcaatatgtataggcttactttggagaattgtgggtgcggttccaggccactgcaataaagcaagtcagacacatttttatatttctcagtgcatataaaagttatgtttacactacactgtaatctgttaagtgtgcagtagtattatgtctaaagaacaatgtacatactttcattaaattttttttatttttaagtttccagttacttagacataaaacgttctatattaaatattaaataattgaaattcaatcccaataaaaatattgaacataaatataaagcacgtgaacatatattttcattaggataaagaattttccagattttttttaaactctagagaaaggttcttttttttttaacaggagcatgtgtatatttgttagctaggtaaactcatgtcacaagggtttgtcatacagattattttgtcacccagatactaagcttagtacccaatagttttttttttttttgcttctctccctcctcccaccctccacccgtaaggagacccgcgtgtctgttgttatcttctttgtgtccatgaattctcatcatttagctttcacttgtaagtgagaacatgtggtatttggttttctgttcttgtgttagtttgctaaggataatagcctccagctccatccatgttcccgcaaaatacatgatctcattcttttttatagctgcatagtattccatggtgtttatgtaccccattttctttacccagtctgccattgttgagcatttagatcgattccatgtctttgctgttgtgaacagtgctgcagtgaacatttgtgtgcatgtgtctttatggtggaatgatttagattcctctgggtatacccgtagtgggattgctgggtcccaaatattttaatttgctacaaaatgctaatgatcatctgagccttgagcaagttgtaatccttttgccggtagagggtcctgccttgatgttgatggctgctgactggttagggtgctggttgctgaaggttggggtagctgtgatgattttttttttttttttttttttaagactgagtcttgctcttgtcgcccaggctggagtgcaatggtgcaatttctgctcactgcaacctctgcctcctgggtccaagcaattctccttcttcagcctcccgagtagctgggattacaggtgcccaccaccatgcccagctaatttttgtatttttagttgagacggggtttcaccatgttggccaggctggtctcgaactcctgacctcaagcgatccacccacctcagcctcccaaagtgctggaattacaggcatgagccatcgtgcctggctggcaatttcttaaaataagacaatgatgaagtttgctgcattgattgatttcctttcaaggaagatttctcaatatcatgtgatactgtttgatagcattttacccacagtagaacttctttcaaaattggagtcactcctttcaaatcctgctgcgcctttatcaactaagtttatgtaatattctaaatcctttcttatcattacaacagtgttcagagcatcttcaacaggagtaggttctatctcaagaaaccactttctttgctcatccataagaagcagcttctcatccattcaagctttatcatgagattgcagcaattcagtcacatcttcaggctccacttctaattctagttctcttgctatttccatcacatctgcagtgacttcccccactgaagtcttggatccctcaaagtcattcatggggatttgaatcaatttcttctgaactcctgtcaatgttgatattttgacctcttcccttgaatcactaatgttcttaatggcttctagaatagggaattctttccagaaggttttcagtgtactttgcacagatccttcagaggaatcactatctatggcaggtatcattttacaaagtatatttcttaaataataagatttgaaagtcaaaattgctctttgatccatgggctacaggcatgaaaacaacactcatctcctgggacatctccatgaaagctcttgggtgaccaggtggattgtcaataagcagtaatggttcgagaggaatcgttttttctgagtagtagctctcaacagttggcttaaaatattgtgctgtcatccaagcttcgttgttccatgtatagagcacaggcagagtagatttagcataattattaaggactctaagacttttggaatggtaaatgaattttggcttcaacttaaagtcaccagctgcattggcccctaacaagaaagtcagcctgtcctttgaagctttgaagccaggcattgacttctctctagctatgaaagtcctagatgacatctttttccaagagatggctgtttcatctacattgaaaatctgttgcttagatcactatgtttcataataccagtaatgaaaaagtctgaaatattgtgagaattaccaaaatgtgatagagagacataaagagatcgcatgctattggaaagatggtgctgatagacttgtttgacgcagggtcgcataaaccttcaatttgtttaaaaaaatgcaatagctgaaaagtgcaataaagcaaagcacaataaagtgaggtgtgcctgtatatactgtggaatggctaagtcaagctaattaacataagcagtacctcacatacaatgttcagcatcctttcattataacgattagaaaaaaaattgattcccggccttggccactgtctgtatggagtttgcatgctctctccgtgtctgcctgggttttccccaggtgctctagtttcctcctacatcccaaagctgtgttattaggagaattggcgtgtctacacagtccccatctgagtgagtgtgggggtgtgtgtgtgggtgtgtctggccatgggatgatatcctgtccagggctggttctctccttgtatcctgagcagccaggacaggctgcagccacacatgctcctaaactggaataattgggtaaatgattatcttacttgtttttgttaatctttcttaaatatgtatctatctatctatcacatttacttcagtatttaatattataagtgttttgggtgtttatttagaagtttggtgatatttttgtgaccagaaatatgccataggaacttaactcttgtttatatcaattagtctatgtcaaattggtttcacattggtatgttgttataccaatacaatatactcaatatactttaagtgcaaagttgcaatttccaagaacgtattgatgaagggagaacttactattcgtaacatttatttttgcagtgagactagttcaaaatctactatcttaccaattttcaggaaaagatacattttttaacacaacgtatgaaatcggacagaaccctaaattcagttattttctcctttttgttgggtgtttatctatgtgatgcgtaagttacgtgtgccacatttcgtttgaaagagatttatcacttgcaatgatctcagatttgtcattttatagggagtttttcaccccaaaccccactcatttagaaagaagaaaagtcagagcccataggtgtgtgctggcagcgtggatgtgggaggatgaagaagggcagatgtccagggtggaccctcatgcaccttcagagctggagggagttctcagaatccagaaataaacttgggcccagtgtgggcaccgcactaccctagcttctgtgggaagggctggggaaggagatcttactgttaaatgcttattgtaccaaattatatcaaccttagtagatgtggactgtgagatgacttcttcacgatgatctgatggacttttaggttagcagatgaagtaatctgtgtaataggccaaaccctattctttttattcccatccatctgaatacacagctgattgcagcagttccttctgtctgtggggaggaacagtaggagaagagcagtggagaatgtatccagagcaggacagacacacaccagggaaattttggcaaagctggggctttaaaaataacaaaataagcactattttaaagtatttaaagagctctgcatttcttgaagtgaactagggatgttagggtaattacccaactactgtttacattgaaagctgttctctgatttaataggaaacatatctggttttgatttctgaaaacatctggtagcaaaattgctgccaggagacccagccagtcctgaaatgggaggaagtccgaactcttggttttctagcgatgaggagtgctgcccaaagctagggctctgagagcagtcatcgtagatggactgattacagtccaggaggtgtacatggttcacaaataaagaattcatgttggccacacacggtggctcatgcctgtaatcccagcactttgggaggctgaggctggtggatcacctgaggtcaggagttcgagaccagcctggccaacatggtgaaaccctgtctctactaaaaatatacaaaaattagctgagcgtggtggtgggtgcctataatcccagctgcttgggaggctgaggcagaagaattgcttgaacccggcggcagaggttgcagccaactgagatcgcgccattgcattccagcctgggtaacaaaagcaaaactccatctcaaaaaaacaaaaaaaaaagaactaatgttaacccttaaatggaaagacctggcactccgtggaagaactgaacagcctggaatgctaggattgatcaagcttggatatcctataacaattatcattgattgccaacatccagtattcttaatttcagctttagggcagtatagggcaagcagtcaaggtctcaggttctgggattagagaggcctgggttcaaatcctgtctcctctactgacttgcttttgtgcagtggttcttagtctttgctgcacattagaattgcccgtgaaattcttaaaactctggatgcccaggctgtatcctagagcaagggtgtaacagtctctaggggtgaatcatagacattggtgtctttgaaagtattctcccttcttctcaccctgggtaaacatgttgagagccactgtttaagacttgaaaagtttcatagctcaatagtggagtttcatcatctagaaattggggatagtattatctaacgtacatgtttcccatgaagattaaaagagataatacatgcatggtgattagtccactgccaggacatagtaaatgctcagtaaatgacaaccaacatccccagctcagcttcttgaactcctggcctcaagaaatcctcctgactaagccttctgagtagctgggttacaagatgagctactgtgcccggtgagctcagtttctctacctgcaaagaaaacttctgaagtgcaaatgtggtggttcccacatatgctagaagggaggcaagggaatgcaattcttgcatttgtttgacagagacagtcagatactctaagcctatggtgttgttgcagagaagcattgagggaaatggctgagcatcagagcctcttctgacaactgtgccactttcttagacctacaggtacacccaaatccacttgaaattacagaaacacattatcttctttcaaattttcagttgtttgttcctagattctccttcttattgtgataagtttttaaaatgtgactttattgtagtgttagacaaggggcagtcttgagaaaattaaatgtgaggaaggtttggggaatgtacccctaaccttctatctagtacatctagaccagttaatccctgagtaccctgattgcagagatggatgtttctagaagtcaataatgcaaattggctttcatttctatgattctgttctcattcactggtataaaatcatgtctacttataggatatcaatttctgtcaatgtttcataagtattaattataaaatccattgtgtctggattaacaattctgctctcagaacattaccagctaacaccttcacctaagtaccagctccagtacagattcacttattcaggggtttttactggcatttattagtgctaggatgttcaccactgggctggggtatggacttcagacctcagaaggtttgggttgaatcctagatcagtacttcgtcactgaaccttggtttctttatctataaaatgttaacagtgggtgttcattttacagggtgatgggtgatgacgattagagatgatataaataatatatatgttgggtccattataagtgctcagcagtgtagatgaatatatattaatattaatatattactaattgagagactagtcattcagtttttcaaatttaattgttttcatgcatttttgagaaggtataattttacattcagagatggtactgaattttctgtgaggcttgggaactactcttgagtggttacaggctatagtaaaagtctgtgtgtgattacaattagctttctttgtaaagagggtaattgcatcctcagttcctcaacatttttgttgccttcttgccttccatgttgaaatgaacttccctttctcttcattcttatgtaaacacaatgcacacagcttttgtattctaagttttaacagaagatcacaactgtgcactgggggtattcagggctgggttcatcaatactaaatcttcaaaatctcactttggaatggaagaggaggctcaaattagtgtatgcccttcgatcctccccaagttctttgtgtgtagcctactaaacccttcatcacataacatggccatttggcatttatatgcctcatccactaaattaaataaatgaaataacatgttaaaaagtgtgcactgaatgctaaccacatagtttgtatttttctttgtctttctttccatattttattttatttttcttccttcctcctttacccattttctccctcagcattttatttctctgtaaccccagggcccagcacagcatagctgaaatagatgtttgctgaacaaagaatgagtaaagtatctttactcttgcaaactcaagtgcaccagtaatgatttctgtctggtatatggcagtgtgctgaccagacatagcagtgactgccaaaggtcatgatcagtattttggcccatggtgtatgcattgctgtatatctatacacatccatctgttacatgattgctagagggtgggtttgtctttttgaatgggctgattataagaggtttgaactaaaaaggcaccagtactttaaaaacaatgatagctgttctgcccaacatagtagccgctagtcacaagcaattatttacatttaaattaattaaaagaagataagatgaaaaattcagttcctcagttgcactaaccacatttcaagtcctcagtggtcacatgtggttagtggcttccatattgaacagcacagataaagagcaattctagccttgcagaaagttctattggctgcatgtgagggagtgtggagggatttcaggtgacttttagagttaagagggtcctactcaagcctgtctcctacatttgctgtggttagagaaaggatgatttcaaagataaaatcttcagcgaggcttggtgtgtcatcaagggaactcgatgatggagcagggagaggcagaaacccaataccaggttgggtattgggagagctttgagagcagggagaggctttgagggtagaacttcctgacttttcatcattgccttcaccaagacccacctcatttgggtcagcctttccctttttctcataccttactcacactttccctctgaaagtggttttaggagataaacacaacttggccaagggatatccaggccctgctttcccagagcctctgaggctgatgccgttggaccagcagcttggcctggggctgtccatatgagctggctctgcacaaagctctgaactggagttctgaatgaacacagtgcctttgatagaatgtcacataaaatgatctcgcttcatatttctcaggctagccaagccttttataggagtaatccgatagctcatcaatcattttctcatatacgaaatggagaaaataaagccacagaatgattaagtatgtgcccagcaattcagcaatagcggtcaaggtgaaaatcgtcacccttcacctttgcaaatcgacttgtggaaattcatttagctacattagcacaactatttattgcagcattggttataatactgaataactggaaacaccatatgtgtctatgtaaataggggaatgggttaagtgaattgtgtcatattaatacaacacactattatgcagcctataaaaccataatttagatttgcatatgctgatatggaaagatctctaagatacagtaagtgaaaacttaatatgtgaaattgaatgcagagcatgatccatttgtgttaattatgtttaaaagatagatattctaggagaatatacaagaaacttttacaactgttttatttggggaatgaacaggagttggcaagggaaaaacttaatttcattttatttcctactgtagtgttagacttgttttaacaaggaacatattcatgttttactttcatttttaaattaaagtttatttatgtgctttcaaaatttaatttttaaaaacatgtttgtatacttttagctcaggtaatacacacatgtgattcaaaattcaaaggtacaaaagagtaaagtatgaaatgttaatcttcctgtttctccatcctctggtcacccaactccccttcttggagaaaccactgttactccccgataacagagatgaatgtttctagaagtcaagaacgcaaattgggtttcatttctgtgattctagtatcttgtaaatccttccagacattctactcatgtaagagaaagttcattaaagttagtttctaattatatttgtaaacatgaatgtgtgctaaaatctcctttgaccatcactcctaacccctctcttccattcctatatttataatattagggttttaaaaacatagctagctggagaagaaacccaacttttccaaatttattagtcaagaacagcaggcaaaagttcaaagttcccagctagcctgttacttagggcccacactttgtgcacaggaaatgctatgaaaccatattataaagagtcattgcatggtttggatcaagtctagcttccggggaaggcatgcagtgggcttggagcagtagctgtttaccaaccagcacagaagtttctcaacaatgcaacaacctgcttggatgtactgggggtcttactggggcaaacccacctggagggatggtgcccatgactggtatagtttctttggagctaacagtctagtacaggaaaacacaccattgattatttaattacaattataataagagagatgaaagagaaataagagcatatgccaggggtctgaagtagttcgtgagtaaaggaagtcttatttgagaggagagtatgaataggaaattagagagggaggaaaagtgtattcccggcagagggtacagcatgtgcaaaggtaacttgttcaggatgcaagtagggaattagcacctctaccacaaccaatattttacaggtcaaagacacactcttcaagggttctctgctgctctgtgtttgagttccattgcttgttgtttctttattagcactctgttcccgggtaggtaaatagagacggcagttgtagctcaaggctgcagtccccaaacccccttctgtaaggacatgaaggctgggatgtttgtgagtatagcacagaatgtgcttggaggtgctcagaaagagaaagctctagaaaggggcaggtctacggttgccctggaggtgtttggtttgagacatgtgccgctcaggatgtgtgagtttctgcagtgaccttgctgccgcaagtggtctgttgaagggtcagatgctggttgaacatgtagcaaattctctaggcctctgatttttccaaccacgttttgccttgctgtttttggttcttctgctgtgttctggcctgtagcctgctcttctgagaacctactatgcttctatttactgtcttcaaggagtaccttccctgtttcatttgcctggctgatttttactggtcttttatgttttgcttttctggatgtctacttctccttccagttcaagagttaggtgcttgacttctgtgctcccatgtaccctgcacttaacttttgtgttcttataatgccctgcacttgacttctgtattcccataaagccttgcacttgacttctgtgttcccataatgccctgcacttgacttctgtgttcccataatgccctgcacttgatttctgtgttcccataaagccctgcacttgacttctgtgttcccataaggccctgcacttgacttctgtgcttccataatgctctgcacttgatttgtgttctcataatgccatgcacttgattcctgtgttcccataatgccctgaacttgacctctatattcccataatgccctgcacttgatttctgtgttcccataaagccctgcacttgacttctgtgttcccataaggccctgcacttgacttctgtgttcccataatgccctgcacttgacttctgtgttcccataatgccctgcacttgatttctgtgttcccataaagccctgcacttgacttctgtgttcccataaggccctgcacttgacttctgtgcttccataatgctctgcacttgatttgtgttctcataatgccatgcacttgattcctgtgttcccataatgccctgaacttgacctctatattcccataatgccctgcacttgatttctgtgttcccataaagccctgcacttgacttctgtgttcccataaggccctgcacttgacttctgtgcttccataatgctctgcacttgatttgtgttctcataatgccatgcacttgattcctgtgttcccataatgccctgcacttgacctctatattcccctaatgccttgcgcctgacttctgtgttcccataatgccctgtccttgacttccccgttcccattgtggcctccacttgccccacacaggctgtaacactggctgtgactctgatgctctcataaattgtggtgcttctcaggactgtgtttacttcctcttagtattcaggggcctggtgcaggccttacaataagactatgaaaatgtttgttgagacgatagtctgcagataagcgcctttgggaactggaacaggtgatctgtacgggctgagggagccttaatgggagagtcggctctctgactgactctcatggtttgggcagaggagagaggaagttgtaggcattctgggtgaagctgttggcagtgcactgaagagagagggaatgcaatgtcacctctcaatgcaatgtctctctcttcagtgcactgaagagagagggaatgcaacgtgaaggacaaaagaaaacttcccccaccccaaccccacatgaaaactcccctcaaggctttcttccatgaaagtcctcctttagcttaacccagtgatgttcaactggggaatattttgccctccagggaatatttggcaatgtctggagacatttttggttgtcccaattgaggagctatcagcatctaggagtagaggccaggaatgctgctaaatatcctatgatgcacaggacagtcagctccctacaacaaaaagtgacccaaaggccagggctggtggctcacgcctgtaatcccagcactttgggaggccaaggcaggtagatgatctgaggtcaagagtttgagaccagcttgaccaacatggtgaaaccccatctctactaaatacaaacaattagccaggcgtggtggcaggtgcatgtaatcccagctacttgagaggctgaggcaggagaagtgcttgaaccctggaggtggaggttgcagtgagctgagattgtgccattgcactccagcctgagtgacaagagtgaaactccatctcaaaaaaaaaaaaaaaaaaagggacccagcacaaaatgtcagtcatgctgccattgagaaaccctaaattaggcagactgtggcttagccacatgttgatcatgtagactggggctgcatgagtaaatgttggatgtttctaattaacttgtacatgtgaccagtgatgttctatgagcagtgttatatgaccagagatataggagaggaagctggtttggggcaagttgctgctttgtttattgacactctgtcttctgtcactgcatggatgaaggtttggtgggatatgcagttacagtgtaggaaggggagacagatgcacaggagacagagcaaggtgggaggagaggctgcagtagcctctgtgctgcccgctcagggaacaaccatagtgatatggcaggatgtgcacaggccacaggctggaacctcaagggaaaccgtgtagctgggtgttgtgataacagcaaggtaagggactggatggggttactttcttttttgatgccctttcctgaagtttccctctggcagaagcgtcacctttggctgacgtggaaataggaaattcaccctgtctccctcttctgttttcttcctaaggttcttgtctgtttagaataccattaagctgggcgtggtagctcacaccgtaatcctagcactttgggaggccaaggtgggaagatcgcatgagccaaggattttgagaccaacctagtgagatgccatctctgcaaataataataataataaaaactagccatggtggtgcatgcctgtggtcccagctacttgggaggttaaggtgggaggatcacttgagcccaagaggtcgaggctgcagtgagccatgattgcacaactgcattccagcctgggcccccatctcaaaaaaaaaaaaaaagaaaagaaaagaatattacttaaccaggaagaaatctggtgattagttgtgtggaaaatggctgtcttctgtttctgaatggacttgtgctgttacacctgttggttttttgttttgatgtttgcctgctcagagtgggttcagaagccatgtggtgtgtgacttgggccttgctggggctgagtcaccggggaatgagaaccctctcctccctgagctgtgttaacagagtagaggcagaatgctgctgaggaaatggtctcttagtgattttgaataccgagggtggagagaattgcttttttcatgaaatctgccgttagaggcacaggctctgaacaatcaaatatttctgccaagctttggattttgaaggcaggcaaaaggaaggagggactttgggaaaatgactttaattagagatttttagctggtgacatttcatacttggtgcaacctgggaactaaatgtaagtggtcatttaagtttgtattgaggtgctgggtcctttattgctttggtttctttctcatcacagatgaaaagcttcattcttaaaataaaatttgcataatgctaattggagtagggccgttcagagaagagagtgggtgcagttttttagttagaaaagtgccaccaagctctgtagctaaaagggcatttggccctattggtgagtgtggaattatctggagggaaggctctttcagcgtatgactttaaagaaagatcacagagaaactgaaagtccaaatgaacctgtgtgaaagtgcggctagtcaagacaaggtggtaccatcatgctccttttggacgaggagagaatatgagtggtagagtagaaagaataggaggtccaggatggaatcttgactcagactaaatgaccttggaacaattgcttaacatttctgagcctcagtttcttcatctgcaaaatgggcaataataataatcttacttgcctagagtggtaaagattggacaccataaccgtgtggtacacagcacagaccgtggcagagcaggtgctatcatcatagtccccaccaccactaacctcaggcccatagatttcagtttcccttctccaactcattcttctttgcagaatatagcatagtgattcaaaataagcaatgcgaaattaaatggccctgattcagtcccaaacccagacttattagctgtttgacctgagacaaatgccttcactgctttctttatgcctcggtttcccgatgtataaatatggcagtgaatatcaaatgagatgaagcacatataaggcattcgtatgatggctggactgtagagagggcaggagaaggttacctgaaaagttggagatggagtgtcctcaggtaggtatcctgatgggagggagtcctggagaaagagagggtgaggagtagagtttggtagcgagcctgacaggaggaggagggagtagggcagaccacccaagacccacagatagccctggtttccactgtctggaggctgtgctggaggccacaaggatacttttccctacccgctgtcccactactcctgccataggtggactccaagagcttctttcattaagtcttccccattgtacacaagctgcccgtctctatgggaaccccataataggagtgttgagaatatggataacactgtggccaatccctgcactctgtttatgcttgatgccataccctatgtggctcgggttccttcacagtgcaatggctggattttattttttaatttttatttatttacttatttatttattttgaggtggagtctcattctgtcacccaggctggagtgcagtggtgtgatctcggatcactgcaacctctgcctcccaggttcaagtgattctcctgcctcagcttcccaagtagctgggattatagatgtgtgccaccatgcccggctaatttttgtatttttagtagagagggggttttgccacattggccaggctggtctcgaactcctggcctcaagtcatccacccgcctctgcttcccaaagtgctggggttacaggcatgagcgactgctcccggcctggctggattttaaaagcaagcattcctacagagtgcagctacacagaagctgtgatcaccttttatagctgacccttggaagtgacatggtgccatttccactgcatattttttcattaagctggtcccaaagatccatccaaattcaaggggaaggacatatatttcacttcttcatcaggaagtggcaaggttctggaagaacatgtgagatgagaagtagtgtgatcacttttgaaaaatacaacctgccataccactctatacatgcatgtgtgtgtatatatatgtatagtagcatatttgtataataatgtatatattacatatctatgtaatattcatacatatgaatatataaaacttaaatgttttacaaaataatacttcccttattacctagggtacactctatgttctcttctattcttttaagaaagatgctctttgccaacccactcagttgatttcctgccacactattgtgttgtgccctgttctatttcttccagatagccttgggcaaagggctgtttcttagagcgccagtgtctaggctgtgctcagggcactacctgactacgtttctggccaagctttatgacgtcagcagttcctgttgtactcctggtttttggctagcagtaaacccaaacttttctgtctgagaggaccgtggaactcaccctctccctgtgtctgaaattccctgaggtctttgcattcgataggcattcaattgcattcaatagtttgtcgttcttaaagcagcaagctggcagagcatcctggttgatggtatataaacaaaccaattcataagtacagccattatttcacgttggggccacacaaccctttgacagccagtgtctgccgcataggagaccagctcctccaggcagcctgtggcgctgtttccctttactggcagctgtgctatggccagccagggcttctcagcccaaaatgagatagctccagtcttttcactctcatgaaaagaacagcttcccacccatcttgatttctgctggggtctttcctctttgtgccatttgagagccacctgggagcacatcttagtaaatatatgacctgggctcatgtttgtagagtcctgtctgagcatctagcaagctggctcacgtgctcagggacttggtaccaattaagacatttattcccacttttcatatggtcgagaagatgtatgtccaacacagtgcttttaactaggtcagagaaaaagcaggcgggaagctatacattttacaatacttagtggaccttcttgctagaattagtgaatggtcagaaagtccgcttctgatggagggccaaagggagctctttcagctcacagccgggctgtggtgtttggggagggaagtttgagagtggccgcagaagtacagatgatcaaaagcagtactcctgccgcccgccctgggagggggcctggactccctcagggaaggcttttttggtgctttgggtagagaagctggagatagcaactgttgaatttccccaggcttcgtgatttaaagccctgagcctttttccattgttgttcttgcagcggcctttaatgtgctgggtgtgaaagggagtggaaatgaaaagccagcgcatcgcatcgcactgggggcctgagatcagaaggtgatggaaaatggaaatgtcaagtttgcgtttccactgctggccgcaagggcctcaggcggcaccccctcctcccgcctcggctttcgcatccttctcacttcctccccagccccccagttttcacacggcccagtgataagtgtcactctgggctgagtgaggctcgtggcttgtcaaaagaggcactaggacgagaacagagaaattcagcatgggcttgagaggcacgtaaaggaactggccttctaaagacaccgcagagagaccgcaaagtgggttggttttccttttctaacactgagaagaaaaggagttcaaaattcacacatggttgatagaaaagacgatctgtttccacatggactttcctatctctgtggtgcccaggatgcttagacctgtgagtctttgaacccagcttgtgttgatgtagctcggggcactgtcaggcctttgtgcccagccaggcgtggaggtgtttgaaaagagagccatcaacacctttccatcggggacttgcgatttttctcttttggttgagtcaactttgaagtttagtagttccttcccacgcttggtggccacaatgtcacgaggctcagcctggtgtcgtggggctgctaaagattccgtagaggctggaaaggtgcctgtcaggggcaccaggaattacgtacaagtctaaggaagctccaggcttaggaaatagtgggataaaccttcctttattatcgcatgggataatcacatttgtgaaatgtagatgtctcaaatttatacaaattgaattctgaaaaacatcagaaaagtttattacaaagcctttttttttgagacaggctcttactctgtcacccaggctggaatgcagtggtacaatcacagctcactgtagcgttgaactcctgggctcacgcgatcctcctgcctcagtctgctgagtaggcgggactagaggtgcacaccaccatgccgggctaatttttgtagcgatgagatttcaccatattgcccagggtggtttcaaactcctgggctcaagggattcgcctgccttagcctctcaaagtgctgggattacaggcatgaggcactgcgcctggccaacaaagtccttttttatcatcatgtttttaactcttcacagttttctatgtctgttacctcacttgagcccagctggatttttgaccatttggataacagttattggatttttctggaagtctctacatgcatgttctctgttcaaagggcttgaggtggacaagttatgcatggccttcagttttgggaagactctgtatgatcctgataaatgtaatttcaagatgattatatcaaactgaaaaaggtgcattgtgatcctctgttacctcagttttgtcctgtgaggtccaatcacacacaacttcggagccactgccagcttccttgtagtttacaaaaaatgctttgccacgctcatcacaataactgtgagagagatatgattatatttctgctgtgcagaggagaaaactgaggcccagagaagttaagtaacctcccccaagacacagatatgagaaagagatgagactcaaaccccagccttctggcaccaggggcatgttcttccaccaacagacactgacagccgttgccagaacaagagaaagctgggcagaagtcgacacctttggcaaagggctgcctgtcctctggccttgctggttgttagccccgcttctgctcataaggtcctgcattatccctcgctcaggggttgccttgcgatgggcctggtcactctgcttccgcatcctcagggggcttgttccttctgcttgtcccaggtgctccctggacctcacctacctcgggtgccttcagaacaccagcaggggattcattcaccttcttagggggtagaggccgcttcccgggcgtttaagggacaggcaatggaagtgggatccttgagagaccaaaggacagtgacgcagaggtcatagttactttcctgggagcagagtaggttcgtgtctggttcctggtccagctccacttcactgctcccatttcccttgtggcccagatggcacagtaagagctggagtctgatgaatctggggttgtgtgtgggacaccaagccccattgacggctgtttctgtggcttcctggctctcatatcttctgtattataggaccaggcagtctgggcctgtggcctgcctgggggcgtgtgtggccttcttggcccagaactccctcctaggaggcacagccaagccaggggagaagggagagagctggagactgaatcatagcctgactaacctgctttccacgtctgctggctgcctagaaagctctgtgatatttgcatctcgcatcgtgtgccctggagacttagaggtagagctacttcagaaacccaactggcactgcctggcgtgagcctgcttctgtgtgagcagcatggcggaagaccaagcttgtccagcctgcagcccggcacggctttgaatgtggctcaacacaaattcgtaaactttcttaaaatgtgaatttttttctttctgcgagtttctttttctttctttcttcttctttttttttttttcctagcttatcagctatcattagtatattttatgtgtggcccaggacaattttttcttcttccagtgtggcccagggaagccaaaagattggacacccctggcctagacccttttcctgaacctggctgtcatcatcatttctgtcagagccggatggagactatttttagttggctttctgggtgagatttgacagaggccaggatgggagatgtcagaatgtgtatactggtgaggaagctgcatgggatgaagatcttgaagctttcagatctgaatgaggactgccaattctggtttatctctctgagcaaccccatgagggactttaacaagctcacaattttcaaatagatttttgagctgtttcccaatcctcctaatcctgtctattttagctctggcctggggaacatcagccccagggtagtggccaagaacacaggacacctggggccagactgcttggatttaagtctgggctcttcctcttactacttctgggacctggaacaagtgacttaatctttccgatctcagttttctcatctttaaaatggtggcaacaatggtaactaactcaacaggttgtggtaagaaataaatgtgttaggccaggctcagtggctcatacttgtaatcctagcactttggaaagctgaggtgggaggattccttgagctcaggagtttgagaccagcctgggcaacagagagagaccccatctctacaaaataaacaaaaaattagcccagtattgtggcatgtgcctgtagtctcaactgcctgggaagctgaggtgggagaatagcttgagcccaggaggtcaaggctgcaatgagcctagattgcaccactgcactccagcctgggctacagaatgagaccctatctcaaaaaaaaaaaaaaaaaaaagaattaaatgtgttaatatatataaagccctcagaatactgcttggcatatgctaggtgcaatataaattttggagctgctacagttattgttgttattattataatgtttatatgatttgtcccctcatgagaagttctctagattggatggataattccaaatttgtttttaaaacctttgtaaaatttcaaaatgatgcaaaagtataaaaggaagactttttgaaagaaaaaaaacccttgtatcaatgaggaataaccactattaatatttttgcatttctttctatattctatacatttttatatgcacatagttcttaaaacaaaataatgattatactgtttttccaattttctccttaagagcgtgtgggtatctttacatggtatggagtcttctttgaaacctgattttaatagttttatgttgttccattatttagggtaagtattaaagtattctcttgttcacctccacatgtccaatttgtactcaatggggtaagtttgagagggaaccccttgaaatatggcttctctgtttaaagaggatttaagataagcgttgatgtgatcaccgtggtcaccatcatcatcatcatcatcatcttcctaatgtttggcaaatctgttaaagaaatgagcatacccagaaccaatgcatcagggttatgtgagggcagcctccaacccattgtagaggcaaaatttttggccactagacctgagctcagcaatggagtggtaactctctgagcccattataattattttaaaaaaagggtgaatgaccaggctggtcacagtggctcacgcctgtaatcccagcactttgggaggctgaggcgggtggatcacctgaggtctggagttcaagaccagcctgaccaacatggagaaaccccatctctgctaaaaatacaaaattagccaggcatgatggcacatgcctgtaatcccagctactcaggaggccgaggcaggagaatcacttgaacccaggaggcagaggttgtggtgagccacaatcacgccatcacactctagcctgggcagcaagagcaaagccgtgtctccaaaaaacaaaaaaaacaaacaaaaagaaaggatgaatgaccatctgctgaggatgctcttgcttcgggcgggaggtagatcaaaaaggatgtctaaggaaggacttatctctgaaatacttcaagtgaaggaacttcatgtagggccatgtagtgggaagaggatgccttccatatcaaagtgggcccacccccggttctgctaccgactcactgaatgcccttggctcagtaacctgcaccctaaacaccctcctcctctgtatggtaaagtggacctgaccacattctcagggcaacctgcgacactcatggagagccgcttgcctcgagctttgcgcatgacaggtcctcaatgaacagaccaactatcatatatttcaggcgtgtctgtgtgtgtgtcatggtgcatgagtttcatctgtcattgggaatctggcctcaatgctggggtgaggagtttgggtatttatacgttgcttcctgtgtgtcaggtatggtgtcaggcatattacacagataaatgctccttgacctaagatgggctcaacattctaataaactcattgtcagttaaaatattaagttgaaaatacatttaatatccccaataaacccatcttaacatcaaaacattgtaaatcaaactgttcttaagtaggggactgtctatatttatcttgaaatctaacactgtctggggtttcattcccttattgtcttttggaaatgagacagactttcaaaggcattcacttggttggttttcaagaatgtgttcagtaacccagctgcaagggggtgtctctgccaccgtcggacatgcagtactttgtaagtggcctgttcattcctggacttgctcttctacctggaggatgtgtgtgtaaaatgaggtacatgtaggagaaatagccaattaacgcaagctgggtttaaaatagctccttgggtgaacctgctagtcacacacattcacacaaagcctacctcgccacaccgaatttccagaattgttaaaccaggccaagacattcccaccagggcacttcctgtttcactaagagaaaattcttgctaagaattcctgccctctggttccctgcagctttcaggaaagcttttgtttaaacaaaggaaccagcctactggtatctgggtgaacacaggcttcctacttagatggaaatgatctgaatggagggggacacgggtttcttttttcattccttttttccctgtcatccacctgaacgctagtgacttacttgcaaaggattggagtagagacacgtaaaagacgtcttgacttttggggaagtgactttctgcttctgtcttgtcaaggcattattttaaataaattgaataagcaggaaagtggaggatgaaggatttgttggatgatattgaagctgggagaaaatggacactctctgtgtagcatcttggggacactaagtgtcacttggtggaccctagtttcctccacggggtggatggggtctcaagccccctccagctacgccattttctgcatttgcagagtcagattttctctcctgagaatccgttcggacagcatgtgttttagggttcttttactccacttggggtttttgcaacacaacaaaacatacaaatgagcttcttgttcattttgttgtcaccagaacctaagtattgaatggcagccttaattgtaaaagggcacaattagaagaaagggagagagtgtgtgtttgtgcatgtgttcttgtcctgtgtgtgtgtttgtgagtgtgtgtgtgaatgaaggtgaaaaaggggaggggacccaaccaacccctagtttttctgaaagcctgttgatttattttcttccttccctgtggatatatttctcccccaaaggaattatgtagctcatgatttcagattttggctcagtggtgctttctggagataaaacgcagccgttgctttattcatcacagattgttgtgcctgtttgatttgcagcctccgggaaaggcctcgtgtgcccggcaaatcctctgctccctcactagagatcctccgtaggcaggatgagcttccggcctgatcttctcaacagtcccttctgtgatgttcatcctagtcaggccttagaacataatagatcctaaaaatgctgatcgaattacagaaggttttttttttcacttgcctctgggagggaaggctaataaagattgcagtggtagggtggagagagtatctggtgggcggcatatgccttttgcgcagttgtcaaatatagaggttgggatagtgtggaaatattgatggtttttttttaaatatggatggatatcctgcagaaagtataattttttaagcttttcttactttttttttgagacagggtctcactttgtcacccaggctggagtgcagtggtgtgatcacagctcactgcagctttgatctcctgggctcaagtggtcttccaacctcagcctccagagtggctgggactaccaagtgcatgctaccatgcctggctaatatttgtttttaactttttatagagatggggtcttgccgtgttgcccaggctggtctcaaactcctgggctcaagcgatctggctgcctccacctcccaaagtgctgggattacaagcatgagcgaacatgcctggccagtttattttttactcacatttttatatgcatgtgataacaccaacagaaaaacaaaagcttcaaaaatatccatcatataaatgtaccatactctctttaattattcaaaataacaatgttatatctaccccttattgaatactcactgtgtgccaggcactgggctaagaattttacatacattattattgttatttttagacatttaggtggttcgtggctccccctcgccactataaatagtgcttagatgaatatctttgcagataatattttgtctgatgtatgacatcctgtttagagtgaattcttctatgtacaattactgggcatggaattttttaaaatacacttgaaacacatcacaacctgctttagtgccatgttatactcccacacaaaggaagaaggtgcctaggcgtatgtcctctcaaagacccggaaaaaatcagtcctttgttgaagtagagccattggcctgctggataactagaagtcttgttaatttaagataaatacctggcagtttattctagagacttaggaaaaaagacagcagctcttgactgggttttcactggatgcattttgaggtactgcacaggaagaagaaaacacgtgccttttgtctcagggaggtcaggagttttcaggagggctctgggatccatctcgattggtgacagcttttctctttcccctgcttttctcttccgctcctaattcccttagtgttccactctcaagctagctgtatctaggaagtgggtgggatgagctcttccttggaaagatgcccaagaattggactacgcttgggatctgagagtaggatgccctcttcctgccagaattcgactgctgttccctcgccctcagacccctgccaggcctccatgtgttgtgtcctgaggcttggttgtcactctctaaaacagggctgcatggatagatgggaggatatctatttggaaacaaatctgtgtatacaaagaaactagagggcccactggctttgggttttccacgagaaactgtgttttctccatccagacctcattcaaaggcacggatcccatgcgagccagaaggtatggactgagccccttctctgtgctggccattgtctcagacaccagagggagacagggcagtgaacaggcagaccacgtcctgcctgcatggagctcacacaccttctcagaggggagagagatgactgcatcccttcagcaggtgataaacacattgccccaaagcccggccggcggggcacaggagtgataggggtgaggggtgagcaaagtgccagcctccatggggtgggcagagaagggctatccgaagaggggacgtttaagtagagatttgaaggaagcaagggagggagacatgaacatttacggacagcaggtttcaggtggaagcaacagtgagtgcgaagggggtgggagtgggtttccgtgtcccgcaaccgtgaggaggtggtgagctggaaagaaacaagcgagggggagaagtcagaggagcggcggcacgggcgctgcagaggaggaagcagatcgtggagggtcctgcaaaccacaggactgactcggggttctacatcaaatgtattcaaagccatcggaaggcgggtagcaggggagtcacaggatccaatgccctgttttaagaggttggctgtggctctggtttagccatcggcagggatagaagcaaggagaccagcagctactgccacagtccaggagagagaggatggcggtctctgtggagagtgagaagtggcccatttaagagcacatattgtagggcgatcaatgtcatttgctttcactcatcccttgggaggaaatctgtggcctttagaggcctctggcatccttccttcccccagggaagagtagaaactttaaaaatagtctgttccctctttggaatcttgatctccagatctcagtcatagtttttaataatccttgcctccatctcgttttggaagacgttcacctctcaaatgggcatgaatcttccaagttctttcagcaacagggaatgcagtggaagtccaatatggcaacctggacttcagcaagaaccatctgcttcttctcctccatgccaagccttctgcttaatgggagcttgagaaaaacacaaagccaggaaccacctgctggggctcccaaactccatgatctgaccaggaaacaccgaccggacaattggcaggatgcatttgaaatctgttagctccagcacctgtttgacttccttctagggctttgcattattgattatattcatgaaaaggactgagaaacatttcccagtgtggcaggaaggctctcgctggaccagtgctcaggagaccttcttttttattccaattctggaattgccattggccagttgtgtggcaacaggcacccatccttgctgggactgcttctttatcttcagcatgagtcccagacagcttgatttctaagatgtgtgccagctttaacatctcacagttctaagctaagagtatgaataagaaatgaggagcagaggtgacagatgacaccaatactctgggcttcgggtgattccttaaagtggtgtctcaggttcaagttcagagcaagctcccatgtgtcaccttttaggcctctgcattcattattttcacaggctgcataacttgattcattccattaaaggacacatgagcaaactgaaggctgagataaaaaaataaaacttcttcatgcaaggagaatcatccctgatggctgcatattctgcaaacggacctagtttgatcagtgatgtgtcaatcagaccctgtgcccagattggatttttgcagctccggagggtaattaatgagaatgggacaattccccttccaagaagtggctgtttcttccagttccagccttcatttttcttttgtcccttctccatcttgttatgatttataatcctgcctgtcccctgcagtggcttcggtgtaagatttttactaagtaggtgaatggctagcttccaaaaatgacaacctttgtccaggtctggggctgaggccaggtcagataagcatgatacctttctctcttcttacctgcaagttaacacattctttccaggtgcaggaggatgacagacccaaggcattcagctttagaaagtgtttttctcctctcactttgtttttgttttctcacttggactgttgcatattgttttgaaattcacccatgcattgatgaaaatggccaaggttttccagaatgcctgcaggagtgtacgtgctctccatggtgaggggtgggttagaccctttcagcttaatcttttcccagcaggttctgaacccagacatgcattgttgtttcgacaaaaacatggcaactgatattgttactcatgctatggttgaaagaatccatattccgggaattattctcctgctgcacttacgagaagccattcctgggctcaaggctctgtgactgttttgagcctgatgttgttctgcgtctgtgcctgacaggctgtgtgatgcagtaagaagccctttgtgcttggttacaccgactgtactagcagcactgttgtagttgctaaatagcactaggactttgggtctctaggttaattctctggttttgtccttggagctgatttaagtccatcggctcatttagcaattgtcaggttcttttggaaaatatttctagactcagccattggaaataggttaataaaaagtccccagcctgtaatcccagcactttgggaggccgagacaggcagatcacgaggtcaggagatcgagaccatcctggctgacatggtgaaaccccatctctactaaaaatacaaaaaattagccgggcgtggtggcgggcacctgtagtcccagctatttgggaggctgaggcaggagaatagcgtgaacccgggaagcggagcttgcagtgagcccagatcgcgccactgcactccagcctgggtgacagagcgagactccgaagtccccgaacatggagtactagagttctctagagtacagaataacttagcatgtgcttctcacttagcacattgtgcagtgtttataatggttttaaagaagttgactaattgatttaatcttgtcttgttctttggttaaatgatagttctgatagggatatgataagaatgatgatgatgggatagcttgagaagccagtggcagtgtctcagccaggctctaccctgggtcctcttcactctgtcagcaaagcctgaccactttcttttcctttattcacttctcaaatctctgcacttttctccatccccatctccatcactctagtccccattgctaccatgccctgcctgaataatgcatgcacaatttttagcctagagcctagcacacagtgagtgctcgataggagtaaataggaatttttattgtgaataattaaagtctggtacatctatatgagataccctctcttggttaaaacctttcagagactttgtattacccttaggataaaatttaagcttcttaccaaggactacagacctagcccctgcccagctctccccctcaccaaatgacactatcccttttgtgatggcacagcagccgtactgactttttcatttcttggacccatcaagcccctcctctccacatggctagcttcttctcatcattcctttttagcttaaatgtcacctcagtgaggccttcttcgactgctgtttctaaagtaagttccttcttgttatcctatgtcacaaactccattggtttctttcatagcattttcacaacctgaaatgatgtttcttcctttctttaattgttttctggctgtctccctgtattagtccattttcacactgctataaagcatacttgagactggacaatttataaaggaaagagtccatttgtaattgactcacagttcttcatggccaatgaggcctcaggaaacttacaatcatggtggaaggcaaaggggaagcaaggaccttcttcacaaggcggcaggagagagagagcattaagggggtatggccaaacacttttaaaccatcggatctcatgagaattcactcactatcatgagaatggcatgggggaaaccaccccctttatccagtcactacccaccagggaagtgacacatggagattacagtttgagatgagatttgggtggggacacagagccaaaccatatcactccccaactagaccctaaattcctcgagggatgggaccacgtttgtctgttaccactgtgtgccagaaacatggttgatgctagaaaaatatgtcaatgttcgtttaatgaacgaatagaaaactagacaccagtcaccatagccatatagataataatggtggtcagttaggcagatggccatcatggctcaaactctatgtgcttcacattcatgatctcatttaaccatttctacgtatccatctgatgagtaagtggaccattgaagaggtcagcttgcccagctagtgaatccggacacatagaaggtctgctgtcactggatgccctgtggaacttaacccaaacatcccactgactcaggacatgggcagatgcctccccttaaggaaaaaatgagaagtaggaaggcttctgaaatctgcagccacccccaggtctggactgtgcccagtagcatccacttcttcagagttgtgttgtgttctgagccggagaggccaaggcaaggtgggtggaggaggtgggggtgactcaacgaccccttcttcgctcccataatggcagtgccctccctcagaagggacattgatgttgaaaggaagggggcagaagggcaggccaactggaaggcaaagaaagactgtgcttcccacaggcaagcacattctagaactgtcccatgtgctcaagttctggaaagagtggaagacgggaggggattggctttaggaggacctgagaaaagttaggtgttggtgtctagtctgtgaggaatattttaagtgtcctccccagacagggcacgagtgctggggaggaatctggatatagcagtgaaggatgaagagggggtcctgccagcagggagttgggcttgtgccctgctgctagctgttctgggatatcatggctgatgtgctttctcattggtgcctaattcccttccctgctcggatactacagttgctgttccctggcaggaaaagcaggcctcattctgtttctagcccttgcatttgttgggattacaatggcctttactttgagtcacagtctcttttgacttatgccatgttcataggattctaagccctcccccactaccacccaagaaaatctaatttaacatgaaaattactttgagctacataatctgtctttggactcagagtggatattctgattcctgccataaacaaaagggaacccctttagaagtttagattcaggataatagccaacatttatcaagcatttcctacatgccagccactgtgctgacatttttcccaacatgcctatgatatgcatgctgtttattggtctccattttacagatggggctatggaggcacagagagatcacatgagggacctaggtggccatgccaggaattgaacccaagcagagtagctcttggactagatctcatcaactctgtgctgtgctacatgcctggccagagatagctgtattcaccctgggctaccaacctaagacaaacagctcagcttctcagcctcttaagcctctgctggctagttttgttctgttggttggatttgcagggcgctggctgactctgcccagtgcttccggcactcacagacctgcgtcacaagcctggctttcctgccagtgtgactgcactgccatctcaagtcatctccaaatatgtgcatcttttctcgccatccacattgcaagatgctaaggaacagggcccatgctttgtttgtgtccagtttccccagggtacctagcttgttagtgggtacttataagtggtttaatgccagttagcctggctggggaacacgatagtctctgctgaagaggcagcctactaatagtagataaaaacctgcttttgattggtgtgagcaagcccttatctgtttttagaataaacgtgatttgctttggcaactgtaaagcagatggaaagcatcatctgtagaatctagaaactgatttctgggagagtcttaggggcttggccctattatgcattctatattggcctctttatatcaggcatctctgtgctgcataattcctaaggtgactcttggtcccattaacctgtgcaagggacggaaccaaactaagctttgagattgaacctcgtttgcttggtagagccttggggtcttatctgccaagctgtttgtttggctttgctgtgggctgctttgcacacatgcttgtttggacaaggcagcacaggctgtcccatggtccagggggtggtagctggggcagccttggagggcagggtcaattcttgcttcagagtggtgctttttttcccatcttggccagggaatgctcatacattcttttcagcctgcctcactcttggcttaccttgggtaaggagagtacagagctaaactacagccagctggaagttccctgcccttctagagctgaatgccactgtggggaccattcattagagaggatcacgttggtttttcttggatcggacctcttcttttgattatccttttgatgaggcatgtgtgctcattacttgtcattgtgcatgctgactccagctgtgctgatgtgccttggtggcaggagagaaaactggaggccaatgacaggctgaacaacccttcacaagtgggtggcctgctccccatagtgccagtccccaggtagatttttaagactggcaggtcacctccgttccttcttcctgtctcccaggagagtgtggaagggtcaaggccctgtgggcagatgcagtgacaaattgtgtggctggtaactgaaaaaagagggcaaaacctcaggtacgagtggcccctcagtctagagtgcagacactccagcggaacatgttggcaaaggctgactcagtggcagagccaagagggtgggccatgtgcctgggcaaaacttcattcccagttcagatttctttgggcctctcatgtatacagtacctgccactgagaccacttgaaagactgaagatgctgggcaaacaggatcatgcttatcgtcatagcaacacacacactctgaggcagacaggatccccaaggccttctcagatgagcatttgataatagctttgctcagaggagccctctccaccccgtcactacacttggtcattacaacctttgtgcttcaaaggagggcgggggaagtgctcagagcacagggcatgctgagttgtgttagcccagaagggaaggcaagaggagggagcagaaggcaggcctgttgccactgatttctgcagcccacgctggttctcccatcccagggtcgacacccctggagtaacagtaacaacggggggaagggagtggacgttaaagacatttgaaatatttcataactgatactgccaaccagaagtgatgttggctctgcttccacactggttgaatatcagttctgctaaaaataccagtcaacctttgtattcgtttgctaaggctgtttacgctgggtggcctaaacaaggaaatttatcttctcatagttttggaggctggaagttcaagatcaaggtgccagcagggttggtttctcctaaggcctttctcgttgccttgtaggtggtgtcttctctgtgtcctcacagggtcttccctctgttgtgtctgcgtcatctcctcttctcctaaggacaccagtcctagtggattaaggcccactccaatgacctcctcttaacctaattacctccataaagaacgtgtctccaaatatagtcacattctgaggtactgggggtttgagcttcaatatatgaattttagagggacacacttcagctcataacacttataatgtactaagtggcagtctaaccctcatagctaatattggagctcttgctaaggctggaattgctcttagcacttgctgtggattatttcctttaatccctgcaatagctctaaagtagctcttcttatttccctcatgtttcagttaaggaaacagaggcacaaagacgctgagtaatttgaccgcaacagctaaaaagaggcagagcaagaagttgaaccaggctgtcccattccaaagctcgtgctctgggcttcctgctctggtctctgaagtaaaggctttccttgggcttctcactggaaatgctgtcaatgagcgggttgtagaaagggatcatcctaattccttgaagagaaggaaaagttaaggtgctccttcccgcctctgactggctcctatcacagactggatggcaggccttcatcagtgcagccactgtacaggaaggaggcctttctggtgacacagtgttactgcgtctgaggaaaccgggctgcagggtacagctggatgaaaatgggcagctgagggccaggcgcggtggctcaagcctgtaattccagcattttgggaggctgaggcaggtggatcacttgaggtcaggagatcgagaccagcctggctaacatggtgaaaccccgactctactaaaaatacaaaaattagccaggcatggtggcatgcacctgtaatcccagctactcgggaggctgaggcaggagaatcacttgaacacaggaggtaaaggttgctgtgagccggtatcgcgccactgcactccagcctggctgacagagtgagactctgtctcaaaaaaaagaaaagaaaatagacagccgatgtctttgtggatcctcacttggtaatgaaggaggcaggccctggagccacgggttggattcagtcagggtttggagccctctgtcttcacagctggcttctctgttctcctctgtgtttcaaggtgtccctttgcctggagtcttccttctgtttttcaccattcctgctgacagtctcatttgtcctataacgcaatgacagcatactcaaaggtctgcatacatgctggctgtttgcaggagctgggctcctcctggtgaaagctcaggtttaccatacaattatgtgaggcttccttgttactttgaaagctttccttctgcatccgtgaaattaaactctgtattgctgtgtgagtaattatggggcccttctgtgctgaggcagagggtgaggggtaaggtgttgattctcagcgttagtgtagggagtcaggtctctctcctctaccctccttcttcctctttctcctcactttttctccttccatccaaattggtcagacctatattggtctgtcctgggatcccatgacactgactctgagcttgcaaattgttctctacttttttctgccagcatattgggtaattaatgccccttctttccacctttcttcctctcttcctttcctcctttctttctttcttcctttcttccttcctctctctctctctctctctcctttctttctttgacagagttttgctcttgttgcccaggctggagtgcaatgatgctatctaagctcactgcaacctctgcctcctgggttcaagcaattcttttgcctcaacctcccgagtagctgcgattacaggcatgcaccaccacccccagctaattttgtatttttagtagagatggggtttcgttatgttggttagtctggtctcaaacacctgacctcagctgatccacccatcttggcctcccaaaccttctttccaactttcattgttgttgtcaggatttaccaagcattaggtagagcctccttcctataaagatgagataacccatccaaacacaggagcaagccagctgcattgccagagccagggctcccagaacacaaattccagagtagcttgctatatttatctgaagttaaggcatcttcccagagtgccaaacaaaacatttgtgcatcatctggggctttatttccctatgttacctgcttttctgatgatgtttacctcagttggccttagaggtttaccctgccaatctaaaaaaaaaaaaaaaaaaaactaaaaatccgtatcattttagaaattcagtagcagatcctatttcaattcagtttctttctttttttttttttttttgaaatggagccccgcccccgctctgtcgcccaggctagagtgcagtggcacgatcttggctcactgcaacctctgcctcccgggtttacaccattctcctgcctcagcctcctggagtagctgggactacaggtgtgtgccaccatgcctggctaatttttttgtatttttagtagagacggggtttcactgtgttagctaggatggtctcaatctcccaacctcgtgatctgcccatctcgggcttccaaagtgttgggattacaggcgtgagccaccgtgcccggctgcaattcagtttctttcttatctgttaagttcaaatagtggaatcctctttattaaataaactatgtgttatactccctttaaattatttctgcttgtaaatctatccttcctactatctctctgtgcataaagacgtaactaaaattgcagtcccctaatctcatgatggttacttgacggatggtgggtttggaggcatttcattttcttcttaggatttgtctcttttatttcattgtttttttccttccttccttccttccttccttcctctgtctctttctctctttctctctctctctttctctccttccttcctttcttccttccttcctttcttccttccttcctctctgtctctctatctttccctctctctctctctttctctctttctctccttccttccttcctctctctctctttccttctttctctttctttctttctttctctctctctctctctttcctttctttctttcctctctttctttctttctttctttctttctttctttctttctttctttctttctttctttctttcctttctgatggagtctcactctgtcacccaggctggagggcaatggcacaatctcagctcactgcaacctccacctccctggttcaagcaattgtcctgcctcagccttgcaagtacttgggattacaggcacatgccaccatacctggctaattttgtatttttagtagagagggggtttcaccatgttagccaggctggtatcaaactcctgacctcaaagtgatccacccacctccacctcccaaagtgctgggattacaggcgtgagccaccatgctggcctgtgttaatttttagaaaatgaactgtcatttttctaaaaacaatggagtaattccaagataagcgactatagaagtgaacaaatctatcagcctgactattctcttaacaaagctgtgttacccgggtgagcacagagtaccttcggacatgaaatcgctgaaggtagaggggcccgggcatcaggtgatctcctgttcattaactcttctgtttgctcctggctggattttattttgacccactggcctactttcctcaggtcctgagttgttcacctgagctcctcattatcttttctccctgccaggtcacatggggaggtccttgcaggcagacatttttgctagaaaagcagccatcggtagaaaagctattctcgcttcacaattaatgctgttttttaagcaaaatgtgcccctcctcaaagttccactggaaaccataaggaggaacaaggggaagcttctacctcactgcccaagataaggagcttgctatattgtgcggaaaattgagttaggcaaagcgaggcaattggaactaggtcctgctctaagaaggaaaggaaattaacctttgcctgccatagtctggcccaaggccacattcaattgtgttctgatcaggcagcggctattgcctgagctggagagagaaggtgtcacttcataaagactctatgtggaggatagatgctaccgtggccgggctctcagccacgttcttctgcagtatgcagtagggaagggcacatttctcacatgccttcaccagattatagttttctgggagcaaagccaagtgctcccacctttgggtgctgacccaagaagagatattctgtgaacttctgctctttggttgggcaatctccgagagtcagttgggtgagtacagggaggagggtggttgagatggagtcaccctatttatttcatcaccgtctacattaaacaaagggtttgtgtttgcaattctcttctgatgaaatccagtggctcaagaaaagccatctgactgaggcctattgtaatagctgatcctctgagccccatttgatcttaactttactccaagtttgctacatagaaactcagaactgggcaaaagatgacatttgcacaaaaccccattcccgcttttgattcaaagataagccctttgaacttggccatctcaggcaattttctcggccattgtaacagggtgttttgaagacactccctagagacataacaaagggctctattttaatgtcatcctttattccaactgtctgggccattctggtcaaggagtgctgctctgtgccagcctgggagtaggcagcatacagaagaaaatggggacaaagaaaggcaaggaggaagatgtagtctttgaggcccgggagctggtagggatgtaagattcttcatcaataagaaaagtaggaagagctgaggctggcttttcaatgtgaaagccaaatggtggggtcatctattttaagggtatcctcctttcttctcttcagcaaatagatcccaagcatacaatttcagctgcagtaacccagatccaaaataaaaagttcttcctcccatagcagtcgctctgtaagcagtctggcagctctatagtgtttgggatccaggatcctctgtcttggcgccaccatccctagagtattgtctttgccttcatggcccaatatagccttatgcttgtcacacaggaaaagggaaatggagggtgcaccatggaaagtttacacagctcttccattcacatcccattggccagaacttagtcacatggccacacttaatggcaagggagactgggaaatggagttttttattcttggcaaccatgggtccagctgaaatgagtggttctgctgctggagaaggagagaactgacaagggcagaggaaggacagccagaggtctttatacttgctatcacactgtgtacaaaatgccaacatggggataaacacaggcagccaaccagaacaggactgtcaaagaaggcctcccaatcacctactgtcagacactttaaaggcccaatggatgagagtccactttcttaaaccccagtttcagctggacctttatttccccttctttgtcagggaaattgaatttagaagttgaggtttgatgagctactctagatctttgcacttagcatcaagtaaggagatggaaaatattcctggaagcatgaatttaaagcaaatagaattcttctcttctcactctcgattgtgctctcgctctcttctttctgccctcccctcccgtctgtttaggattaaggagttgtacagtcctaacgtgaatacaggcgccctttctgaagccgtgttaccttgtacttgtagagcgcttgcaggctttgcacaagctgtccttcagagggtttcagggcaggggccacgggaggaggggtgctacagaaagctcttatgtaatgtggtaaacaaacagcaaacggcgtttcattttccattagccagagaggcattttatttccaccagaaatgggagcagacgtgaaagcaattagtgttagtgggtttatagtgacgtccctggagccagcaaaatcctggggccagatgtctgtactttactggttccttgttccgagaacatttgtgggttctttccacccctgcccatctccacctcctgccaaaaggacccaaaatataacagttgggagaacataatattccctgaatagcagaggcgggaggcctgttctttagagatagaggatgctgcctcagaagttggggtggggaggccaagagtgaaaggaagatccttgccaatgtccccaggctcctcctggccctggaacccttcaagccactgatgagttgaggctggggcttgcgagtatctctcaggagtggcaatgtctcaatcccgtcttttaggcttctttgttcactttatcttcaactctgccctatcccacccacaatacacatatagtgggaaagacagaaggagaaacagcagcaaaaatagaagctgtgaatgtcctcccctcctcctgtatgctggaataatatgatctaagtttcattccatctcaaactttactatagccacggtcaccagcaagaccaccaaaaccctggaatctgccacttacgtattttctaatgtagaggttcttttcctatgtaacctcacatcttctttcaaggcctcatattggatgatttataactggtcatctcaatctgtgctgtcccattcagagtcactagccacttgctagctatcagcacttgagccagtccaaattaagatgcgctgtaaatataaaacatacactgggtttcaaatacttcatttgaaagagaaatgtttatactgattacatgttaataaaattttggatatattgtgttaaggaaaatatattattaaaattaattccacctgttttttccccttaattaacatagctattagaaaatgtagaactatgcaagtggcttgcatttgcagcttgtatttttctcctattgggaaagtactggtctatgttatcttttaaaatactgtagcactttttttaagttattgaaaatatttaaatgaacttttaaaaaccttctaaagcttgagaagacttcaaaagaaaagaagaggctctgcaaacctttataagaggaaagttggatagccaacaaagagatttcctagcatttgagatagagtctagaaacttaatcaccttcagggaccaggtactgatgtaaggtgagatggggttgaggatagacaacagagaatggtggggcttgtggtgcactggggagagaggtgccctacatagagacatttaaattaaaaaatgtttaaacattgggtgcctcataaagcaatggtgaaatttgacccaaaggtggaatttggcacagaggactctagcatgttattcttggaacctttaaaaacaaactattttacatggccgatcccatgaaaattactcatgcagacaactccaaccaggttttgtaaatgagaatttcctctttacatcttgaaatgacattactttaaattttgcacccaagtgtgcatgcagcctccactgtgtagttcacatgttcttttgctaagaacgtggctaacagttagctcataccgagttcctgttctgggagatgctgggatagtgttgcctcatttagttcttgtaacacccttttgaggctggtggtatcttcatttttattgaggctgaaggaaattaagccacccccttggctgtagcaaaaaagcagcagaactgaggttcaggctcacgtgtttcacatactacagttctaatccaaaggatttataaaacttcatcatacacattgtctcatttgatccttaaaagaagttcatgaaaggcaggaagcttaggcaagttcctcggtcttcctggctggctgcagtttccctcagttctaagaaggggctggactaaatgactacttgatgagtccatggctttgtgacttcctggtgcaagaaaaggctgagcctggatcagacttggacccttgggatcccttaaatggttccccatctcagaatattttgcacagtcttttccagtaattttctatgtgcattaaaatgatagtcaatattttagacatcacagaaatgtattccaagtttcatttaaaattaggctgatttcaaactatcgttgtttactttttaacttttaaaaatatataaacattcaaacattttgctattcatatttcatctataacttcccacttttttcctgccaaaaatgccatgtattcacagagttgtacaaccatctccataatcaattttagaacatttcgtcaccccagaaataaaccatatatccattagtaatcactcttccaacatccttccactgcaaccttaggcaaccactattttttctgtttctatagatttgccttttctggagattttatataaatgaaaccataaaataagtggtctcttctgagacttctttcacatgtcataatattttcaaggttcatccatgttgcagcatatatcagcacttcattccttttatggctgaatatatttcatcatatggctatacagtcttgtaacaaataacaatgtttcagttaatgatggaccacatatataatggtggtctcatagtattataatttttactgtacatttttacagatacacaagtacttacccctgtgttacaattgcctacagtatttagtgcaataacatgctatacagctttgtagcctaggagcaataggttgtaccatatagcctaggtgtatggtaagcacataaaaacctatcatcaggctgggcacggtggctcacgcctgtaatcctagcactttgggaggccgaggcaggcggatcacctgaggtcaggagtttgagaccagcctggccaacatggcaaaaccccgtctctactaaaaatacaaaaattagccgggcatggtggtgcatgcctgtaatcccagctactcaggaggctgaggcgggagaatcgcttgaacccaggaggtagaggttgcagtgagctgagttcgcaccactgtactccagcctgggcgacagagcgagactccgtctcaaaaaaacaaaaaataccaaaaaaaaaaaaaaaaccacacacacacacacacaacaaaacaaaaaaaccctaccatttaggtttgtgtaagtacactgtataatgtttgcacagcaaaatcgcctaatgatgcatttctcagaacatattcccatgagaaaatgatgcatgactgtaccaccttttgtttattcgttcatcggttgatggacatttggattgtttccaccttttggctatggtgaacagtgctactatgaatatttatgtacaagtatttgtttgagtacctttcttcatttcttttggctatatacctaggattggaattgctgggtcatatggtcactctatgattaactttttgaggagttgccaggatgcttttcaaagtggctacaccattgtacattcttacgagcaatgtttgagggttccaattattctacaaccatgccaacacttgttattttctgtcttttttattatagtcatcctaatgggcataaagtagcatcttattgtggtttagatttgcatttccctaaaagatgttgagcatcttttcatgtgtttattggccatttatatgccctctttggagaaatgtccatttagatcctttctcattttttatttgagttgtcttcttcttactgaattgttaagttatttacatgttatagataccctttttcttctcacatctgtgactggcaaatatattctaccattcagtcggtggttttatatcttgatgatgtcctttaaagtacagttttttgtttcgatgaagttcaagttatatatgttatatatagtcacttgtcttttggtattatatctagagaaggctttgcctaaacccgagatgtcaaagttttactcctgtgtttcctttggagagttttatagttttagcttttacatttaggctttgatccatattgagtaaatttttgcatgtgacatgagataggcctccaacttcatttttgtgcatgtggatagccagttgttctagcaccacttgttaaaaagacgattcttttcccattgaattttttggcacttttgttgaaactctgttgatcgtaagataaaatttatttctgaactcttaattaattcttctcattgatctatttgttcatccttatgccagtagtacaccatcatgattactgtagctttgaggtaagttttgaaatcatgaagtgctaaagtagttttcctactacttttaaagaggatattctttcaagataacatttgctattctgggatcctagcattttcatgtgaattgtaggaccagcttgtgaatttctacatagaaagcaactggaattttgatagcaattgttttgactctgtagatcaatttggataatattactgtcttatcaatattaggttttctgatccatggacgcaggatgtcattccagtgattaagatcttctttgatttttttcaaatagattttttaattttcatagtacatattttgtacttcttaaatgtatttctaagtattctgtttgatactgttgtaaatggacttgttttcttaattcatattcagattgttcatttttctgcaacattttaaattaaatagtgccccattatccataaatacttgtatgacattccatttgtaaataccatagctagcatctctaactaataaggactggttccttccctttccctttttcccttcccttcccttcccttccactactggacccatgacaatgaacaaggattccctgctctcatctgctacacggctcagattcagatatcctggattatctataaaatgtcgtctcatggttggccttttggaatagggatccaaacaggcccacgccttatgcctggcaattagacctttcaagtctcctccgttttctaagagtccctcttttttcctttttgtgctttaagggtttaaattcatattattccagtgcaataagtctgtcacctcacacaggctaacatctatagtcagacatcctccttaaatgggtctcggctctctcgcacctcactttatagaaaggaatttgaaacatagacttatggtcttcacaagtatgtgatgctgttgttggctctccaggcacctgttgaggggaagtaatccttgctgaggatattgacagaacatcattgtttcctgtccccaccccctgtacttgagagtcaatgactaatagtgataaagaatggtggagaggactctcgtgcctctttctttaataggtgaagaaccagtctcccttgtcccacagaacagtttgtcattcagggcctcctgtgttccctcaccatctttactctctagtcaccagatatggtgttgtctctggtctcccaagactcttccctcttgctttgaaatgttcatctgcatgtaagacatgagtctgactagggtccaagcagagcttaaaagtggaaaaagattctcccacttttatgtatttttccatcagcagcacttcattctgacgaaatgtgtgctcttttgatcactatctgcttcgaattactcctaaattaaattgttcaaaaaggataaactcgaaacggaggttctacctggtcttgtatcagcattttcctgatccctgctaagaaagtgagcctcataacaggaggaatgggacatctgaaatatgtttttatggagtatggccaggcactaacccatcagcacagaggtgcctaggagctggagtgggatcttggtggcttccgcagtggtaaccaccaactcttcaagttgctgagctttggagagatggggaggattcctggataatagagagatattcaggcatttcagggcagtggctatttactaactgataaatagatattttaacatttatcccacccccaatgtgactgccattgtgtgctggctgaatccctgcccggtcctgcatgtcttagtgtattggcctgcactatgtctattttagagcttttgccatccaggaagtctttattttctcttcaatatatcaggaggccagaggcctcttaaaaaaaaaaaatcagaatccccacagttgtatagattaaaacagcttctcagtaactgtgtgaccacgtggaggatcttaggagaaagaaatgatgtattggcttccccaaaagggagcacccctcagagacatcagatcacccttctccttctccctgctacttttgttgaggtaatttacatgcaataaaatgtacctattttaaatgtatagctttgtgagttttggtaaatgtatatacctgtgcaatgccactgcaatttcaagatatggaaatttccaatcattccggatagttgccttagttgactttttggtgcattctctaccctcccagcctcagcccctgtcccagccccagtaaccactgctgtgctttctgccctgatagctcactttgcctgttttacaattgcagataaatagaatgtctgcatccttttgcctctggcttcttttcactccgcataccggttttgagatttcttcatattgttgcatgtctcagtagttcatttatctttactgctgagtagtattctattttatgaaggtatcacaatttttttatctattcagctgctgttggatgttgagtcgttgccagtttttggcaattataaatacaactgcaacgaacattcacatttggttcttttgtgtagatatatgttttcatttctctttggtaaatttctaggagtggaattgctgggctttagagtaagcctttgttttactttattaaaaatctgtcttgctgggtgccgtggcttgcacctgtaattccagaactttgggaggccgaggcgggccaatcacttgagtccaggagttcgagaccagtctgggaaacatggaaaaactgtccctacatgccacccctccctcccccaccaccaaaattaatccaggcttggtggtatgctcctggaagctgaggtgagagaatcacctgagtccgcgaggttaaggctgaagtgagctttgattgcgccactgcactccagcctgggtaacatagtgagaccctgtctcagaacaaaacaaaacaacaaaatctgttttccaaagtagtaaagtgcttgtctagctcctgccttttaaatgcccagtgttactgtaactggctcatgatttgtgctagaaaaaataacaacgagtcaaatcaactggtgtctgtggcgtccttgtcaatagagagctttcaaaagcagctgagcccctggatgtccctccctacctcctgttctgggatgctgccccgtggtggccattgactggtctgagccctgacctgagggaaagtggagtcgccatttattgagaagcccgggaggctgagcaggcggcagtgaggtgctgatggctcaacagagcctctttctgcctgcaggcagctgggatcctaaattacctcctttctgagtccaggaaagcccattaatcaaaactagacacccgatgtgagctccttggacgctgcatttgtgcactggggtgcacattctgggttaaatatacaaaataggtgtttaaggacagaggagcaactttttttgaaacaattttttattcaggtaaatttacatactgtgaaataagcagatagtaagtgtatactttaatgagctttgctaaatgcgtacactcaaatcaccaccaatcaagatttggaacatttcaaaaggataaactcgaaacggaggttctacctggtcttgtatcagcattttcctgatccctgctaaggaagtgagcctcgtaacagatccaagttaggtgtctgtgaatgctgttaacagtaataactgactaatgtgcaaggtatgtacatacctgatctcatttaatcctcagaacagccctatgaggtaatagttctcatttccattttgaagatgaggaagccgaggctcagagcagtaactgacattgtacataacataatatacggtatagtacagtaactgacatgaaacagctcgtgctggcagcccctggagtcaaacccagcggcagaggctccaggtttgcactttcccctatacacagcttctcagacttccttctgcaatagcagttaaggacagggcaaagaagatgcatactttggaagatagagggagtatctggggatgtggcccatagtcggaaaagtcttcttttaaaaattaatgcaaaatttgttttcagttccaaatgtgacagtgtttattttcatataaaatatgtttcatttgcaaaggtttgcccctgcccccattcaaattgttagtaatagaatgtgccaggataatgccacgtgggctgtgtgttattccgggtatgcccactgcaagacatcaccatcttctgctcattcctaagactgaattggtacttggccaaatatttgtcctgttccccaccctgctctcctgttttgcattggcttctaaagtggaagcaggtggaggcaaatatctgccctcccaggtggtatcagtgccttctgttctccccagtgggccggcccctgggttttatgatacaaggctgggcctccacccttccaggttatggcagaggctgccccagagatgccagagggcctggaggtgaaagaggaagtgaaaagtgaagatgcagatcactttctcacggcaggcccgagtcctcagatggagagacaaggggcctgagctggacaccacttttcatttcgagggtggcttcacatttggatcttttgtgtagatatttgttttcatttctctttggtaaatttctaggagtggaattgccgggctttagagtaaggctttgttttactttattaagaatctgtcttgctgggcgccatggcttgcacctgtaatcccagcactttgggaggccgaggcgggccaatcacttgagtccaggagttcgagaccactgtgggcacccacaatgggtctgctcctgctccctaagcaaaggttctgggtgctcttgtcccttctctgagcactgtttccaacatctggcctctctgtggctctgaaggtgtcggtcactgcacacctgtgatcaccaccactcaggaagccctaccttcctcctgggaggtaaatatcccttcctctgacttgaaacatccccaggtatatgagtttcccttgctgttgtaataaattgtcacaaatttagtggcttaaaacaatacagattattctcttcacagttgtagaggtagaaagtctaaattcagtgtgctggcagggccgtgttcctgctggaagcttctggaaagaatccatacccttgccttttccagcttctagaagctgcctgtataccttggctcatgacccctttctcaagtccctccaacctcttgcttccaggacacagctcctatgacccattctgatctcctgcttccttcttgtaagagtggtgcttacctcccacccacctggctaatccaggataatcctcccagttcatgatccttaacttcatcccacctacaaagtctcttttgccattctataagaaaacattcacaggctctggggatcgggatgtcgacattcagtctgccacacaggaggactcagaatccttggcaccaactcctaggaaaaggccacctgccctgtaggtgatgatgctatgggcacagctctctgtaactcagtgtggcgcttactttgagaggtgcactggaaagcacatggcccctcagagccaagttcaaatcctgacccaattgttagctctgttaacctggcacagattaaatatgctatttcagagcctccatttcctgatccataagagggaggtagagatctgcagggaagattgaagataaagcatctagtactgtcgctggcaaacagtaggtgctcaacaaatgatggctataattctttggaggatttctagtgagctacgtagaagcagaagtgacactgttcctcagcttagttcacatgggtgattacatggttactaaaaacaaacaaatgaaacatgtaaatgcgttccccaggcctccaaattctaaaacccggagctacaagtttggaaagggcagatgatagtgacatacaacgatgacattcctgcatccccttccgcctgccctctgctcatcccaggctcagatcccccacggagtaaacaaagcacagttagactagaattgcctcagtgccctggactggggctaccacggcctgagtgggaccctcagggtcaggtcctcagcttctgtgctcatggctgggaactaactggtgcacggtggagtggccgtagcgttgatgccaaggaagtttcttcagtgggaacaaagaccagggaactcataaagcctctgggctctttatctcaagtggaaaagggctaacatttctgactgagtactggcagccagttgctttacataagttatctttatttgatccatcaggatattgctgtctacattttactgatgaggaagctggagccccgagagcttaactcccttatctgagctcacacagctaggaaggggctggcatctgtccaacctctaagccaaccagcccatgacacagcagtatctgaatttctggctaattcatgaatctctattgtattgcaagaaaggaaaaacaagatccccttatcagaggcaagggaatgatatatgagttttatcgggtggtttacaggctctttatcatggatccagtgcttcttgggagacggccatgccaaggccgtggctgtcatgctgatggatgtgccattccttgtttaatccagcctgtccctccctcctgaaaccttagcccccatttcccatctaagggacattgtgagggcaattttttcatttttaaatacaaattttaattttatctatgtatttttgaactggcaatgtagtcaccttgttcaaaattaaaagaagcctgggcaacatagcaaagccactgtctctacgagaaaaaagaaagaaacctagccaggcacagtggctcacacctgtaatcccaatactttgagaggctaaagtcgggggattccttgaggccaagagttcaagaccagccagggaaacacagtgagaccctatctctacaaaaatttttaaaaattagccaggtatgaaaggctgggcatggtggctcacgcctgtaatcccagcactttgggaggcccaggctggtggatcagttgaggtcaggagttcaagaccagcctggccaatatggtgaaacgccatctctactaaaaatacaaaaattagccgggcatggtggcacgtgcctgtaatcccagctacttgggaagctgagacaggagaatcacttgaacccaggaggtggaggttgcagtgagctgagatcatgccactgcactccaccctgagcaacagagcgagactgtctcaaaaaaaaaaaattagccaagtatggtagcatgcacccgtagtcccagttacttgggaggctgaggcagaaggattgcttgggcccaggagtttgaggctgcagtgagctatgatcacctcactgcactccagcctgggcaaaagagcaagacctcgtctcaaaaaaaaaaaaaaaaaaaaaaaaaaaaattcaaagggtacaaaagcagatatgctgaaaagctccttccatccttccccccgccagacacccgttctcctgcccagagacgaccaaagttatcagtgttccttccgagagatattctacataaattcaagcaaatatatatttattcttttttctgtacagatgatagtataccatgcacattcttctgcatcttgcctgtttttgtctaacttgtcatataatacatgaagaactttctcattttttcatctgaagtacaaattttatataaaattatgaaaaaaataatgtgtgactaacaacaaggtacatctttttaaatgagtctatttatcagttagctagcttgcacaataactgtacattatttaagacattggccaaggagccaggcacagtggctcacgcctgtaatcccagcactttgggaggccgaggtgggtggatcacaaggtcaggagatcgagaccatcctgactaacatggtgaaacccgtctctactaaaaatacaaaaaattagccgggcgtggtggtgggcgcctgtagtcccacctcctcgggaggctgaggcaggagagtggccgaacccgggaggcggagcttgcagtgagccgagatcgcaccactgtactccagcctgggcggcagagcgaaactccgtctcaaaaaaaaaaaaaaaaaaaagaaaagaaaaaagaaattggccaaggaaaataatgtactattttgtagagtccatatcaactgaataggtaacaactccctctctgaaaaaacagttgtttgtaatcaatgatttttttaaaaattaaaaactcaagcactggttggcactattgaaaagaaatagttcagcaagttttgttatcaccagacttgagaaatgagaggaggagactctgttttcaggaacccctgttatggtaccgtgatggagagctctacaggagctgccctgttgctgtgtctgcaggttctctctggactggcccgtggtcctttctacaaggatggcaagcaggggaaggggcatgactataaaggcttctgtcccatcttcttacttctttccttttttttttttttttttttttggtggttgtttttgagatggggtcttgctctgttcctcaagctagagtgcagtggcatgatctccacccactgcaacctctgcctctcgggttcaagtgattctcctccctcagcctcctgagtagctgggattacaggcatgcactagcacgcccagctaatttttgtatttttagtagaaacggagtttcagcatgttgcccaggctggtcttgaaatcctgacctcaagtgatccacccacctcggcctcccaaagtgctgggattacagacatgagccaccacacccagccctttttcttctttcgataaggtctcactctgttgcccagggtggaatgcaatggcacagtcatagctcactgcaaccttgaagtcctgggctcaagcaatcctcctgcctcagcctcccaagtggctggggttacaggcacatgtcaccatgcctggctaatttttaatttttttttttttgtagggacagcatcttgctatgttgcccaggctggcttcaaactcctggcctcaagcaatcctcccgccttggcctctcaaaatgctgggattataggtgtgagtcattgcacctagcccttcttatttctcttcttctctggaaatcttcctgacttctttgtttctacctacctggctcatctgcttaccccctctctcacaatatgaaatgacaagagtcagttatctgagaggatctgcagcagcagctacaggccagctcctgcaggctctctctccatcagggtacagcaacagggtctgctgaagacaggctcctcctctctcatttctccagtgtagtgatacaaaaacttgctgaaatatttgaaataccaaaactcttttcaatactgccaaccagtgcttgagtttttaaattaaaaaaaaaagtaattaagaacaactttttattttttggtggaggagtcgttacctattcaaaacacactgaccagaggaaacagattttcttttttctcttttcttttttttttttttttttttgagatagggtctggctttgtcacccagactggcatgcagtgcaacctctgcctcccgtgctcaagtgatcctcccgtctcagcctcccaagtagctgggaccacaggtgcacaccatcacacctggctaattttcatatttttttagtagaggtggcatcttgttgtgtcgcccaggctggtctcgaactgctgggccaagggatctgtccacctcagcctcctgagctgggattacaggcatgagccactgcacccagcctaggaagcagctcttagtgtggcaacagggagtgggctgtctcctcgtgtctaccagagtagtccctggtctacaaatttcagaaccttgagtagttccctgctatgccatgggcaggcctgttcaccaactgtctactacaagtaactgtttatcaactgttttaaagaataacccacaacagccattggtaacaacaacaaaatgaccatcggtagaattgattgaacatggactgtgtcccagaccctgtgctaagctctcaagatggttctcaccactccaatgaagtcgatacccttatatccccatttaacagatgaggaaattgaggattagggagattaagttacttgtccagatacgtggtagagctttgaggtcagactcagcccttggtctggctcgcctgctggcatcctttcccgatattctctactgaagctttcttttctctttttgaaaagaaaaaatggagttgttacctattcaattgatatggactctacgaaatagtacattattttccttggccaatttcttttctctttcttttttttttttttttttttgtttgtttgtttttgagatggagtctcgctctgtcgcccaggctagagtgcagtggcacaatctcagctcactgcaaccttcacctcccaggttcaagcgattctcctgcctcagcctcccgagtagctgggattacaggcgcccaccactgcgcccagctaatttttatatttttaatagagacggggttttgccatgttggccaggctggtttcaaatggccaatttcttaaataatgtatagctgttttggtagctagctagcaccgtcagataattccagccacggttactggaattgaagtccatttctcaccttctaccttcactcaaacaaaaaaatcgaatgttcaccatccactgtgaaataaccaatcatatccttgaaaatcttaattaagtgtcctgtgaaactttccttctctgggcttctttcttcctttccctgttacgctaacttcaagcaacagaggtttattggagatggtctttgcgctgggccagtaggggacaccaagaaatagatattcctggttgtgctcaagggtttcagcagctggttaaaaaccgctgagctagtgtttattcggcacttcctgtgccaggcactgtgctaagtagcttgcatgcattgcctcatgcagccctcataacaaccttttgaggtagatactgttattatccttccttccttccttccttccttccttccttccttccttccttcctttctctctctctctctctctttctctctctcttcctgtctttctttcttttttttttttcacagggtctcactgtcaccaggctggagtatagtggtgctagcatggctcactacagcctcagactcctaggctgaagcaatcctcctgcctcagcctccctagtcactgggactacaggcatgcaccaccacatctggctaattttttaattttttggtagagatgaggtttcgctgtgttgcccaggttggtctcaaactcctgggttcaaggaatcctcctacctccacttccagagttgctaggactgcaggtgcatgccacagcacccggctattttttgtattttttttagagacagggtctcactatgttgcccaggcaggtctcgaactcctgggtttaagtgatcctcctgcctcggcctcccaaagtgctgggattacaggcctgagccaccatgcccagcccctgttttatataaacaacaacaacaacaacaaaatggaagcccagaaggtttggaggaactacctcactgtaatagagtttacaagtagttgggacctcaatattccacaggaaaatatgcctaagaattccagatgtcatatgattaaggctcggaaagtcataactggctcaggcagcaagtattagagaaggagagatacacaaggcttggggtcctcaggggggatgtcccagaggtggtgggacttaagttggaccttggagaagagtggcacaatggggactggagaggcaggtagcaaaggagggaaggtgggaatgtgcacggggggctgaacttgtttgaacttgatgactgagcagaggaaatgcagggggtccttttggtgaggtaaatcatggtaaacatgggaaagtaaaaaatgcatatcatgggcaatggcaaagattaagttctaaacagaaggggtgtgtatgtgtcagtatttggaaaatattaataatatggtagtttggaaaggggcgttagattttttattatcattatactttaagttctagggtacatgtacagaacttgcaggtttgttacataggtatacatgtgccatgttggtttgctgcacccatcaacttgtcatttacattaggtatttctcctaatgctatcccttcccccaccccgcaccccccaacaggccccagtgtgtgatgttccctgctctgtgtccatgtgttctcattgttcaactcccacctatgagtgagatcatgtggtgtttggttttctgtccttgtgatagtttgctgagaatgatggtttccagcttcatccatgtccctgcaaaggacatgaactcatccttttttatggctgcatagcattccatggtgtatatgtgccacaatttcttaatccagtctatcattgatggacatttgggttggttccaagactctgctgttgtgaatagtactgcaataaacatatgtgtgcatgtgtctttaaagtagcttgatttataatcctttgggtatatacctagtaatgggttcactgggtcaaatggtatgtctagctctagatccttgatgaattgccacactgtcttccacaatggttaaactaatttacactcccaccaacagtgtaaaagtttcctatttctccacatcttctccagcatttgttgtttcctgactttttaatgatcgccattctaactggtgtgagatggtatctcattgtggttttgatttgcatttctctgatgaccagtgatgatgagcattttttcatgtgtctgttggctgcattaatgtcttcttttgagaagtgtctgttcatgtcctttgcccactttttgatggggttgtttgtttttttcttgtaaatttgtttaagttctttgtagtttctggctattagccctttgtcagatgggtagatttcaaaaattttttcccattctgtaggttgcctgttcattctgatgatagtttcttttgctgtgcagaaacttttcagtttaattagatcccatttgtcaatgttggcttttgttgccgttgcttttggtgttttagtcatgaagtctttgcccatgtctgtgtcctgaatggtattgcctaggttttcttctagtgtttttatggttttaggtcttacatttaagtctttaatccatcttgagttaatttttgcataaggtgtaaggaagagatccagttttagctttctacatatggctagccagttttcccagcaccatttattaaatagggaattctttccccattgcttgtttttgtcatatttgtcaaagatcagatggtcgtagatgtgtggtgttatttctgaggcctctgttctgttccattggtctatatatctgttttggtaccaataccatgctgttttggttactgtagacttgtagtatatttgaagtcaggtagcatgatgcctccagctttgttctttttgcttaggattgtcttggctatgcaggctcttttttggttccatatgaactttaaagtagttttttccaatcctgtgaagaaagtcactggtaacttgatggagatagcattgaatctataaattaccttgggcagtatggccattttcacaacattgattcttcctaaccatgagcatggaatgatcttccatttgtttgtatcctcttttatttcattgagcagtggtttgtagttctccttgaagaggtccttcacatcccttgtaagttggattcctaggtattttattctcttcatagtgattgtgaatgggagttcccccatgatttagctctctgtctgttattgttgtataggaatgcttgtgatttttgcacattgattttgtatcctgagactttgctgaagttgcctatcagcttaaggggatttggggctgagatgatggggttttctaaatatacaatcatgtcatctgcaaacagagacaatttgacttcctcttttcctaatagaatatcctttatttctttttcttgcctgatgccctggccagaacttccaacactgtgttgaataggagtggtgagagagggcatccttgtcttgtgccagttttcaaagggaatgcttccagttggtgcccattcagtatgatattggctgtaggtttgtcataaatagctcttattattttgagatacgttccatcaatacccagtttattgagagtttttagcatgaagggctgttggattttgtcgaaggccttttctgcatctattgagataatcatgtggtttttgttgttggttctgtttatgtgatggattacgtttattgatttgcgtatgttgaaccagccttgcatccgagggatgaagctgacttgatcatggtggataagctttttgatgtgctgctggattcggtttgccagtattttattgaggatttttgcatcgatgttcatcagggatattggcctaaaattctctttttttgttgtgtctctgcctggctttggtatcaggatccgacattcccttgactatgaaaaggagttgtcagattatctgggcattgctctatgttgctgcttggatgctcatgtaaacattaatggctctgagaagtattaatactgtgctgcattagagaagcctcttccatgtgggaaagctgcttgcaatttcagtttcttgtgtgtatgcctatgtaactgagtgtttaaaatttcttcaaaaactatcaaaacagaagcacacagaagtacacctattaggcgaggatatcgttggtctaatcatctatcctgggactctgagaaatgagatggaggctggtaatgaggatggaatgcagaattgatgctttttaacatttttcaccagcatttcccaaacttcttgaccctagcttctgtttttaatgcatggcacaatcttgaaccccctgtagggccggtgttcctcagaaacgcttcagaacagctgttgtagtcccatctcgctttgccaatgaggaaatggtgcccaaggccacacagatggtggctgagtcaggactgggacacgagaccaggggtgcacatgaagtctacacctgccacatgcccatatatgctgattattcagcctctgaaagtaaaggtgtgtgttgaggtgagcaccacccattgaaagcccccaggaagaatggcagaatgaggatcgttggggagcagagctttgtgggcagctggtgttcactggtgcaggagccaatgatggctgggaagaagacattctgccccaaacgttagcccacctgtctgcccaggcaagtggcacttctgctgacgctggctgctggctgctggcagggacagccgcatgtcctccgaagtacgcgagattccttcacagtcaggccaggtgctacctggagtcagctttcacctacgcggtgtgtatctagtgcacaggtgtatcagtttgcttgcttataaatgaaaagggggatttggacctgacggataggaggctccttagaacaactcgacatcatgatcctttaggatctggaaatacaagggaaccgaggattctgaacactgaggctgttgtttaaaaaaaataaagtaatttgggaagcggaggcaggagaatcgcttgaacctgggaggtagagtttgtggtgagcctagatagtgccattgcactctagcctgggcaacaagagcaaaactctgtctcaaaaaaaaaaaaaaaaaaggaattacccaaactccctggcctggggcaacagataggataagggaatggagtcatggagtcttataagctggtgattgagggaaagacggagtgaaaggaaatctaaaggagaagagaattgcttagacctgagtactttttctgtgctgagtacttttttgtagagcagagagggaactgaaggggaataattcactggctttatccttagaagttgggatttaatgtactctataagtgctttgacttccacagagtacattctgtgggctttaagcccttgaagaaggcaggtagctttgttttagtcactgtattttacctatacctcacttatactctatttaaataaatacttacatttctttttattcttcaagtagaaattaacctgcatacaaaagttgctcaatgagctaacagaataatttggcaagttctactcataaaacccttgatgattggcttgtcttactgcactgagaaagcagaaaaatgattctgtgattttcttctcttgtctggcaaaaatataggacaagagttctctttggacccacattcctatcttctgtccacagccccagcagaacagccactactccttgttgcagattggttggtctttaagggaggctcccaccataactatttaccagtgttgaatgacagttccattaagtatgtcacatggttcccaatggtacttttatgttacagatgtcatcttgcagtttagtaggaccagagctccatgggggcaggtacctgggtggaatctctcctgcctgtcctgtcttgagatacctacacggaaggctggcacacgcccgagattagactgtcaacctcacaccggacacacacctcctctgctggccccagtattggatggcagtggttgccaagcaaccaggttatctgcactctcccggttactgagcagatacagaagacaggcctgcaactctcattgtagggtacagctgggagataccccagggggctggaacttgaactctgctgccaccagctaatcctcccctgtgacctaagggtctctgccttctggatctgtgagtctgccttttgagaatggaaacaaccatctaaatagatgaaatgataatagattcaagcttcaataaaacggagccccaacctcatgggcaaggaagtctgctaaatccagaggagtttaaactgatttatacctaaattttctatcttcatttgtacgcaaaagccctttaagaggcaattgattattttacagtgcatcagagagctcagaaaaatggatttactctcgaggtcagaaaggcactgtgcgcatctctgcctcccagcctgtggaaccggcgagttagcgtgtcagtggtctccctgtaatcactcaaacctcgctgtgctgctgtggatcattgagggcctctcatggccacattctgttgtaaatcatcaacgagtactaaaaagtctctacagcaagtgaagtatgcagaggagacaccaaagtattgaccagtatgagaaggctcctacgtttcaggaacttataattatggttgggagtaggaggacgcagacattctggaatagaggtgtccaaacattttccatgcacagtgcctttaatgtctcagcaattttcttgatggtgctcctaggccaaaagaaagacttcacgagttcatagagtaagtgactaagtccaaacaataagtattaatcctaataacttagcaggtgctttaaaaaataactcataaatcgaaagagtaaaaacatttttgttttattttagtttagtttagtttagcttagtttttgagatggagtctcactctgtcacccaggctggagtgaagtggcgtgatctcggctcactgcaacctccatccccgggttcaagtgattctcctgcctcagcctcctgagtagctgggcttataggcgcatgccaccatacccagctaatttttgtatttttagtagagacggagttttgccatgttggccaggctgctcttgaactcctgacctcgggtgatccacctgcctcggcctcccaaagtgttaggatttacagacgtgagccactgcgcagtaccaatatgtttattttgttcttaatcacagtgttaatggtgttaaaaaataaatgtaggcccattaacattttaaagcgcttacttgaacattcagcaattcatgagtccagcagtaccagaccaaaagtggttcagtgctccacccaggggtgtgaagaagcaagtcaaagtggaaagtccctattagatgttagttggcatttctaattggttaagcttcagtttcattttactgtttacatagggttgggttttgatttgcttacatagaaacccaaggcgtgagagccatctcagcctaatggccttcccattaattattttaacaatgagatgtgtatgcctatggggcactgcacttctcaaacttggaatcagatagaactctgccacccacagttccatcccacaccttgattttttcctagtgtatgtttgttctaatcacagcaactgccaaaaactcagcttcacagagataggctgtcactgaaaggaatcttgtgtaactcagtgttgaaactgggaactttctccagttagcagttcctgcagtatccaatagatgtcaagtaacagaatgtttccctctaaatttcaaaacacactgcagttaccctgagttcaccatgggacctctggatgccttaggttgggaaccatggttctaaagcacagaaagtagttgtggaaaatacaagatttgatggcaacctgggtgaccccccatcttttctccagtaggttcttaataaatgtttgtgggattacaaaggaatataaatcattctattacaaagatacatgcatgcatatgttcattgcagcactgttcacaatagcaaagacatggaatcaacccaaatacccatcagtgataaactagataaagaaaatgtggtacatatacaccttcgaatactatgtagccataaaaaggaatgagatcatgtcctttgcagggacatggatggagctggaagccattatcctcagcaaactaacacaggaacagaaaaccaaacactgcatgttttcacttataagtgggagctgaacaatgagaacacatggacacaggaaggggaacaacacacactggggcctgttggggagtagggttgggggagggagagcattaggaaaaatagctaatgcatgctgggcttaatacctaggcgatgagttgataggctcagcaaaccaccatgacacacatttacctatgtaacaaacctgcacattctgcacatgtaccctggaacttaaaataaaatttttttttaaaagtctgtggggttaaatggttacatgaaaatccacaattccaacttgtattagtctgttctcacactgctaataaagacatacctgagactgagtaatttataaaggaaagaggtttattgacttacagtatcacatgtctggggaggcctcacaatcacggtggaaggtgaaggagaagcaaagtcacatcttacatggtggcaggcaagagagtgagtgcaggggaacttctctttataaaaccatcagatctcatgagatttgtacattatcatgagaacagcatggaaaagaacccccccccccatgattcaattacctcccactgggtccctcccatgatacctgggaattatgagagctacagttcaagatgagatttgggtggggacacagccagaccatatcacaacatgatttcttcaccatcatatttgactggctgccagattgcattcaatattgtaatatattataatcaagataagcacagatacacagagccagattatgggggtttggatcctggctcaaccacttactaggatgtgaacttgggccttgactcttgagggtttggctttgtgtgtgaaattggaaggacaataacctcttcaggttttgggaggattcagtgagatgattcctacaaagcacttcgcaggtacttggtggtagttactgcttcagtcagcaagtttgtgtgtgtgtgtgtgtgtgtgtgtgtgtgtgtgtgtgcgcgcgcgcgtgtgtgttttatttctcttactccagggggcacttttagacttcagtgtgattgagcatggtgacctgtctcaggaggaggtgttcatgagaggagggtggctgagggcttgggggaggaggaggggaggggataaaccacctgtccacaccccttcccactggagcacaaagcaagccacacttgggcctctgtccttgttctctgcatctgacacacctttagggcattgcagtgtctgagacatctagacatctcccacatgctccacccaagtcctgtgcaaatgtgatgagtggctgattgtccaggagccccaggccagacttgttccagcactgtgtccatgcagaaccctttcctgggaatcagtgagtcctttccatatggaagcatccccaggatgtagaagggaaccttttcagctccgctgggacccttttctcaggggctggagcctttattacctgtatcctggcctcttctagggcctcactgtattaggtggaagagaaaatatgaaaacttaactcctagcccatttccttgtctgtaaaatggggctgctgccacctgacatcaccaagcaggctgtgggcttccagcttttcagattttgaatgagtgttgctggggccaacacagattcaggtgcacccagttttctgggagttcttgccaactgggtttctgtcttcaaaaacagtctgcattatttttgcatattgttgcaaaagaaaacaaagcaccaggactcagcccagccagcaccaggggcagcatgactgctctccacccccaggagtgagcagtatttcagcctttcagccttggatagctgggcttgctgaaacccccatctcattcagctcagtggttgtcattgggtccctaggtgaaacattaagcactgtcccttggagataagaggttgtaggagggaagaaatctgctggcttctgggctgcaggaggaagcctgggcaatctggggtcagatgctttgtaaacattcccttacactccccacttctgtgtctcaccttgcccatttctgaggtttctgagctctgttgataagacgaatttcccagcgatcctcagcctagtgaggatggtagcatagacctatgaaaatatcagcttgcaaccaaaagtgaggttttgtgatttggaaagaggagttttaatctacagccttgcatagctagctaagccttccttatttcctgggagcagttaataatgtgtgtagctaagtgctcaggcaacctctaccctccatttttccagccttgactccctgtggccaccccagccagccagcaatgccaacacaagtctccgccaggggtgtgtgtatgtcataaattgaacttgacattcgctaagctgctcccgccagcaccccatcatgatattcacgtgggcagatctgggggctgcagttttgcattttgttttcattcataagagcatctgcccagggatccctggaagagagccctacagtaagtgtattctttggttttatttgtaactacatctcagtaataactttcttcttgcagtaggcctattccttccacaaactttcccatatactattcatttcatactgtcagcagtcttaacaaagctggcaggaccagatatcagctctgtttcacagacggaatggaatgagtggcaaagccagatctagaacccacgtagcttttgagtctgtatctttcccatcccctgtgctgccacgcacttacctccctgccaccaacttgttttgaattcttgcagctctaagagctgacctgtgtagtttttatttgggtctgttattgacttgagcagacatttatgagcacttttcatgggtcaggacagtgcccatctgtcctttcatcctcaaagcagcctgttgaagaaggtgttattattccagttttacaggtaagtgaactaagcttctttgggccacatggcttgcaaatgccaggtgagaatttcaatccacgtcccctgaccctcatttcacttccctgtctgacaaatcacactagatcttgggctgctttactaataggcactcagagcttcctccatgtccaaatcaatcttttcagaaaggggtccagaaagcttggaaacctgttgtactcaagaggcatttaaattgccaacaacagaaactacctggctgattttagcagaagggaattatttgaaaggaccttagttcctcacggaaatgtatgagaggctggggaagtcagcttgagaaacacaaggaacaaagaaaggcttggcagctgcaaccacagtccagatcacaccagagaacccatcaggtgtagacagagtcggttgcttgcagtggtgctggtgctgggtgatagaagccgtcattgcatcacgggcatcacagccctagaaactagatgctgctacccccactgccagcacagatctccaccttcctccattctcatgtaccaggccagagtggtgtccctggttggccaagcctggctgtgtgcccatggctttgctgcaaaggcttctgggaaagcaaacagctggcgtgccttctatggggggaggctgtaccacccaccaagactctcaggtgggaaatttcccaatcacagcaaggagattcaggggctgggcagctccccaaaatcacacatctctactacctttcctcccccaaacacacaaacactcaattattgcactgtaggttacttgtcagtttttacgattaccatcttcccaccactccctgggccttggcacagactgcgtctaccattggagctggtgcaggtgaaagtgctctgggcagtagcacgttaatcatgtttaccacctgctgtgggtggagccctggagctggtttgcctcctggctgcaggaggggtttattgcctctgttaggccacaccagcagcagatggggttctcataagctgattgtttccctctgcttctggctgaagcaggaggatctcttgtttcttggggaggaagcatggagcactgggctgctttcctttcttgggcaggctttggccactctaggtgtttttatccctccaaggacatgcgttcctaggctgcaggaggtggggttaatgtgatcccgcagtggctttcctgctggcacctaggttcatggaagtggagtatgtggcatgcccatcactgcctggttcctttggctgagatgagaggtgcccacttgcggaaggctggggccctgggaggacttcctttattcagctgtgggaatcctgtaggaaccccagcactataatggctggtttccccatcctctctctttctcgataataatctttcagttgtcccagcaggttcactgccatggatatggagcaaccagctattcgtcttcaaagagaagagccactgtgttctcccatgtcaagcctccagcccttcttgctttccagttctttcatcttcaagctctagactctgccctcctttcattgatttcccaaatcttctcaatacaatgctggggtctgctgggggcggagcctgaggggttggcacttcctttattaacccatctggtagttctgaggctcagtcgtttcatcctatcccccattccactcatgtgaaaaatggaaaacacggggctttgggaccacagaactgaatttgcaccctggatctgcacatatctctgaccttgggcaatcataatctctaagccttagttccccattttctacaaatgggggtgatggtgctggagtggtgcttaagtgagccaaagggaagcccctgatgccaagtggatacatacaattttagctcctcttctcttccttgtgcccttttctgccccaagactgaggctctggccctgctctgcacctgtttctgttgctactgcctacagggagcccagaggtggggacacaatctcattgataacaagggactgaaaatagatcttaaaaaccctagagcacctcactgagtctttctttttgatggagtaaaaactactgaaggaactcagaaacaaagagagttttggaaggaatgtagacatatgtctgagaatacttaagactcttcctctgtgggggtttctagagcttgcaggcaggtgacacaatgagtggacggggctggagaaactgtgggaggtagaattctaagaggacctttgccacttggtgttacttctgtgattagttctacggcaaaaaggggatcatctgggtgggcctaatctaatcacaggagctctggaaaggtggcaaattctctctcactggtggcaaaagaggaagtccaagggcttccaagcatgagaagcatccaacttccacatgctgttgctggcttgaagatggcagggcacacagcaggaaagtgggctctgtagaagctgacagccagcaaggagatggggacctcagtcctatagccacaaggaaccaagttcaaccaacagcctgaatgagcttggaagcagattcttctccagaatgattgtgtgaaaccctaatcagggatccagctgagcccacctgaacttctgttctagagaactgaaaagcagtaaatgggtgttgttttaagctgctcagtttgtgctggtttgttatagcagcaatacaaaactaatacaggacagcaatgcactagagactggtgaggactgtggtatactggagatgtacatgccatctaactgtggaagccactagatagctacaactgagtgttgtcatgcaggaggctctgcagaagaaacccaatgtttctggatttttgcattttttgagaccaaaacttaggactgtgtgaaatatattggcttttaaaaaaaaaaaaaaaacatatctgctgggtaaatacacttgtgatcccttcactaaagcacaacccaccttgaatagagaatttcctacatttattctgagatgttgcctagtttaaagtatcttgccttcccactgtacacacagtgaggatagtgtttctcttgaagtattgacttgcaatcaacaaggagattctgaggttttgttggggactaagtgagggctttgggagatgataggaggttcccagccttttggatgtgtgatgaggtttcacgccatgcttgggaagagaaagcatagattcctttatttctcaacagccaggctgaccgccattctaggcctccatcctcttaggtgggtgggtaggaaatggaattgtagttcaacccagcaatctcacccaacccaatcatttgtgttttcttgtatctcagcctcttttacatgactctggtgacccaatgtttggcattctgctttttcctcttccactccagaaattggctctttctatgggggtagtgtggcttatgagactctggctctgtcccttggatccagggggtgcactgtgaatcctggcttgtccaagcgtggagtggtggtgtaggctcaagaatggctgttctaggccactctctagaatagcgaccaccgaggtacagtagttgtcatttggctattttggaccaatatagcaggactcaactgctggagttcacagtcctggccattttcctctgtccgcaagtccctgaccactgtcaccactgtatccaactccaaacctctgttctcccatgggacctcttgcccccgtcccacctccctgcctccttagactctggtctgtatgtgccactgacatgaaggggaggactgccccaggcctccctgcatgggaagctggccactagcttggaaggtctcttggttctacatacctacctgttgtttctagacctctaccctcagtctcccttgggctggaagtagcaagcttttcttttctttcctggggaatgcccctgctggaaggagctggctagtgactccccaatatcatatctgcattctcaactgtagcctcaaatataagctgtagagatggagatgtatgggatttaccaataaggtaacagaaattcgaaagtgtttcaggagtaaatgctcattacacatgtgatagtttccgtcattagatgaccaaatgcacacgaagcaatctgagaaaatccccgtgctaatgggggttcctgggcaataagagggcccaggcaacaggcttgagtcatgggggacggttcacaaaggggttggtgggataggggcttggccttatgggcgggttgaatgtagaaagcacttgagcaattaattcagttcaacactaagtcccatcaacatcagccatcctgacttcctttcactggctgtaaccctctttccaagcccactgatagccccaggagctttaacacaggagctgaatatgagtcactctgacccatttccgtttcaggtgtgaaattaggatggaaacttaatcaaattgccctgagactttagatgtcacccagcagaacatcgggcctcccatccccaccgccctggtttctgaagctcactgcagtcagtcgcatgattgtcttcagagccctccttttgtgctgtgtgctgcagacattgcatatatgtgcacaggcaagtgtagccagtaaaaataggagcgtgtatctctgggtgacatgggtgcaaagaataacctagccagccttaagagaagggtgatcagaaggcagcaagggtgcaaaagttcagatcagacccaaagtacgacttgatgggaggaataagtcctagcgttctatagcactgtagggtgactgtaattagcaacaatttattgtatattttcaaatagctataaggagaatactgaatgttcccaacacaaagaaatcataaagatttgatttctttggcatgggtgcagtggttcatgcctgtaatcccagcactttgggaggtcaaggtgggcagatcacctgaggttgggagtttgagaccagcttgaccaacatggagaaatcctgtctctactaaaaaatacaaaattagctgggcttggtggcacatgcctataatcccagctacttgggaggctgagacaggagaattgcttgagcccgggaggcagaggttgcagtaagctgagattgcactgttgcactccagcctgggcaacaaaagacaagagtgaaacttgatctcaaaaaaaaaaaaaaaaaaaaaaaagatttgagatgatgaatatgctaattaccttgatctgatcactatacattatatgtattgaaacatcactataccccagcaatatgtataattattacgtgtcaattaaaaaaacttatttttggctgggcgtggtggttcacacctgtaatcccagcactttgggaggctgagacaggcagatcacttgaggtcaggagttcaagaccagcctggccaacatggagaaactctgtctctactaaaattacaaaaatgagccaggtgcattacaggtgcatgcctgtaaccccagctactaaggagactgagcaggagaatggcttgaacctgggaggcggaggttgcagtgagttgagattgtaccactgcactccagcctaggcgatagagtgagactctgtctcaaaaaaaaaaaacaaacacacacacacacacacacacacacacacacacacacacaaaacatatttttaaaaagactaggctggctttgtagccagacaatctgggttcaaattccagatttgactctactactatcgagttgtggaatcagaggcaagttgcttacccctcagaggctcagtttccacatctgtaagatgggaacaggacaagtacctggttgtgtagactaaaacatgaaaatgcatgcaaaatacattgtgcctcctctggcacaaagtaagcactcaataaatgactgttgttgctatttgaaattgtaccatttgtgctatgagcagatcagactagtcttttgagttgggaagttgtattgatgttaagaactttcatggggattgaaaatcggggatttagtctctccaaatggcctcttttaatgtatatggaggaagggacagagggaagagtgagatttagacaagtcaatcctgatgatacttccacttcttttgcagtttctaacttcaaaaaaaaaaaaaaagcgtagtgtgtgtgtgtgtgtgtgtgtgtgtgtgtgttgggggagcaggaaggagattagcaggaagaaaaataaaaggggaaaaagagctgggctaaatggagtgttgcagtaagtgagtgagagagtgaaagtgactaaatgtcccatgtctcagggtgcagggatggagggattataaatagctctgttcatatgcttagttctgttgaaaccagagatttgtctttgacctgccttttttctttttctttactctaaactccaattctgcttaatctttcttgaatcacagattattttaagaatctaatgaacctctctcagaaaactgtgcatcaggatatacacacaacagtttttataaacagtccagtattagcagtttcccagattccacattaaacaccattaatcttattttagaccattttttatacccgaaccaaactctgaatgatgaataggcaagctcctatgcatgcttcagaacccagctcaaacgttccctctccagcaaaactttcttccatgcccaaatcggttgggcagcccttccttcatggtttcattgtttatcactttctgagatctgcattccataatcacgcctttcctgattggtctcctctactagactgtgagctcttattcatctttcttactcattttttggtcccagtgcctagcacagaaatgttgaaggaacaaagtataaatgaagataatgagttccctacttgaaatgcaaagcaagccgtctctaccttctgcaaatgcgaggaaaaaataggaagccatatctgatgggacttcttttgggggctctgccaatctgctgggacagctgcaagccagcctgcagaactagcatccgttttggcttctagaagataaggggctgtcaacacaagtggaatgatggggaggaactcgtggaaagtagcattgcctctgagatttccaccatgattagatcagggattgtgtgattggaagtgtgctcacggggagggatgcttgaggttccaggctgattatgttagggaacagccctggtccctgggtggccaggtgtcagccatccttcaggtacccagggataacttccctgatgaagggcagcaacgggtacctgctctgtgggacaacagagctccatctttccctagaggtgtgaatgggaagccccttgcccagactcccaggggtaccatttggatcaagtgtcagccccaccaaagctctgatctgtcctgagataggagcagagactcagccacaacttggagaccctgagcttggaggatataaggggagcagctgcctgaagggctttagggtctctgggctggaaactcttccctatagcacagatttctcaggagggccatgaatattttggctcggttacagagaacacattcagcaggcttcggagggagctgattttccatttccccatgagggatctcaggagggcagtaaagcttcttctgaaattatttaacttaaaagcttctgatgaagatcaggcacactgccttgcacatagcactctaacccgtcagaagtttcccacggatctcattttgctcctaattacagcacggcaacataggttggaaggtatctctcagctccaccattttaaagacagatagcttcgctttatttgctgctgagaggatattgtcttaaaattttaagttggttcaagccccaaagccttcaaaagacccagctttagctctttgttctcacacaaagggctgcctggtctttgtggagtgagttgtgaaggcctccccagaagactcaggccagtcctcgtgtgctttctgccactcacccgtggtcacactgcatcacattgacagatgcggcaaccctccaagacagccatttctggatgcagggacagagccctcaggggggcgagctgagcatggagccgtggcgtgatggttcacagtcctggatggatgcagcagagtgaccctcacccatcatacccgcatgtgcacagaaagcccctcccgttcctctaccaccattgagagcaccaggggactttgccagacctctcccaccacttgggaaatgtttggggcttggcaaaacacaaaacatactttctcaggcacttcttgttttcatggttttcatttttcactgcctgttaatctggagtgaaatagagtccatatgttccaagtccctttgcctaattctctgcagcatgatttttatctctgaaattgtttgaagtcccaaagtttttgatctttttgcctcagaaagtgggcaccacattttgccacaagaggatgtaaacctgagacctaaagaacgtgtgttggcctggtgctcccagaggtgtgtggactcagcatgggacaagtggctcccttgtcttttcagggaagttgttcacctaggagtaagaaagtgcagatggcctccttaggctgtgcacagtgacctagggcagtattcttttctcatggcaaaagggggaaagcctttgtaggtttctccattaggaaattagccatggctgtaaagggcttataagaaaacagggcctctgcctctgcctgaacccctcattttctgtcttcccggtagaatctacttaccctcaagtcaaagaaatgtcatagccacgtgcttagagaagagtgcaagactgcctctacttatttcctacattaaatgggagagagtgcttttctctaaagagccattttggtgctttctcctatgctaagacagatgattgtcatgagaagatcaaatacctgtggtatttgctggagagccgagtccaaagcccaggctgacagacaggcagtttgcagaacaggtacctgtgtgctttcttcgggagaaatcccagcatacagtgaatggcatctgacacacccaggattgtggggtatgtcaaccacacactcagacaatgcaagttccctttacgttgcacgtggttttagggatgagaggaatgctctgtgccacactaatccacctacacacatacatacaacacacacacacacataaacacatatacacacacacacagtgtctgactagaagtctatacttagaattgtgctcctttagcaagaaccttttgatagcgaagatttgggtggggaaaagctggaaaaagaaaaaacctgaggatcttgaggatctcagagtgggcttttcagaagcccaccgagagaggtagggtaagggaagactgtccagaatgcagagaaaacaaactttgcttagcaattcgtgaagggtctgctggctctgcgttttgggttccttttggaactggaaggattatcttatttttaacaatatgtcccaaagcctttaagaatttattgtgaatgtatgatgatgcctgggcctcagaaccggaggggatccgtgcatgggcttcaggttgtggcagagttttgtgcatctgtctgagttgcatgttttggagagagagtccacagctttcagtaagaatcataaagaggtcttgagcaaatggagcaagaagacctggcaacagagcccgggcttctgaagctttcaagattcagggtcagcagaaccttctaccagctctctggggctcaggaactgggatgggcccatgagagctgggacctgccagctcccctagactttggaggaccctttttccattattgtgagtgctgtccttcaaaggtcttcctgtctctttgtggatttttttaattagctttttttttctgaccataaaattacaaatttagaaaatatggaaaaatgtgaagaaaataaaatcaatcataatcctactaatccaaccactcctactaatcagagtaaacctcctagggtttttctttttcttttgtcatttcagagagggttgagatcatatatgtctatgaatagagcccttttcatttaacattacatcataatcatcttacttgccattgaaaagtctccataagcatcattttctatggttgcacaatattctattatatggctgcatgacagttgacttaaccctttttctgttgggtatttgcgttgctcatagttgttttgttttttgttttgagacagggtctcactgtcacctaggctggagtgcagtgacacagtcatagctcactgcagctttaaactcctgggcttaagtgatgctcccacctcagcctcctaagtagctgggactacaggcatgcatcaccacgcctggctttttttaagaaatgggatcttgctatgttgtccagactggtctcaaactcctggcctcaagtgatctccccaaaactccagaattatgggcgtgaagccactgcatccaacctctgttcccagttttttgctataataaataatgcagtcaaaactatctttgggcaagaagccatgcttgcatattggattagttctttatgagaaattcctagaagtctcgtttgacttttgaagatatcgtgtgttaagatgttgccgagacccatctgtaaagcatgaatgttgcaaaagactgtgggcacaaaggtggggcaggcaacaaggtttgctgggttcctgctgcacactggatgcaccacagggtgctgtgggtattaatggagacttaagcattaaacaacccagcccttatccttgagggccttactgtataatgtggagccatatcatatatattaggttggtgcaaaagtaattgcagttttaccattaaaaagagggcaccacaattactttcagtggtaaaaccacaattacatttgcagcaacctaataaatagcctgaagggatgtgtgtgtctcagatccctggggaatccacatgtgagtctcagggtggagttgcatttttgtatatcatgtcatgttcattttacatcttctggagctttcatcaaaatctctttatctatggagctgcaaagaattccatgcaatcattgttttgggtgtgtagggaaggggtgtggatcatttttctctaattattcttcttttattattttattttatagtttttataatagaaaaaaataaaaaccttttcttaagtgccattaatatgaccaatagcgtatactaagcagatggcagtcaggatcctgcttttggggaccttgaaatagggtgtagtagaggccagagcctacacccaatgggtgtgaggcagattttggcagtatttatcacctgtccctgcagtgacctaccgctgcatttacatataaatctgttcctggtagcatgagctggtgttagatgagccttatgcctacgggatcatattgtcagaacataatgttacacaggtgtgtggcacttttggcgatacaaaccaatgttatcttatctctctgccggagcctcagtcctcatctggttgctaagcactaaaagagcttctcactgctatttcatggccatcaggggcaccagcccagctctgccaacatagaagaaaaggcaaggaggtgtggtcattctgtaggctccaggcttttcactcagggccagaactagatgtgcacgtggaaactgacagccatggtttgtatttcctttctccaatctgtaccgaccagttctaggatttggctagctcttccactgggaaaatgagaaagccatgtgccaggctgtggccctggacagacatctgcaatctcacgacttctacaaaaccccatcttagctcagcacgttgtaagtgttcgtggattttgtcaattgagtgtctgtagtcaggacaagtgggatagggtggcgtgtgtctcatcaccccatttctcttggggtctctcccacatctgcggctggagtgcccaggtctccattagagggtctatgggtgagcatgcctagaccacagagacctgccccaggacaggtgctttgactcccaagtctttttgcctagcgtctgttttatctgacttgctaacaaatctgtgtcattcttttttttttttttcttgccctccagttggctgtttctccaggtccagctgagttgtttttcttcttccctgactcttggcttccatgaaataaatccctttctcattccctgccactctcctttcctttgatcctttgttttccccagacccagaaccacttagtctcctaaagggctcagagaggcattttggtctctgtgtaatttatacacacatcacagtcatcacataagactaaatcttatttggcctgacctccactggccaaaagcaacataccccaccctgaagcagatgggggtcgggaaggaagcaggcactgccaactcctcagatttaggtgatatccgctctttgtaggaaaagaaaaacgttaaacgaacacatctgtgaccactgccagccctaatccagaatgcaaaataaacaagcatgataatgctcaaaatacaatcctggggaattgtgaggggtggagaggggaagacattagccaaaagcttagaccttcaaagggtatcaataagaagttcttcagacttaattagacttaccttggctaggatttaagtttatgtattcttattctgtccaaatacaggcactcttctcctttcactatatgatttttaataataatacacttttactaaaaatgatattttaaatataaaatacaacatatcaaacattttatatatatgataactgtaacaatatattttatatgtaaaaagattatattgtatactttaatagtactatctaatattttgtatttaaataacataaaagcaaaatctatttctgtttaaaatgttataggtttatataaataaaatataaaatgaagcattttatactaccttagcaaatattgttaaacatttctaaaatataggttacttaaatatcttaaaataaaccttactatttaaatcaataccagacatttaacattaaaattaagtaagtcatggccttttgggaccaggacacctgtaatcccagcactttggggacttagagggtaggggaccacttaagaccaggaattcgagaccggcctgaacaatataaggagacccctgtctcttaaaaaaaaattggagaccccatctcttttaaaaaaaaaaaatggctgggcgcagtggctcacgcctgtaatcccagaactttgggaggctgaggtgggcggatcatgaggtcaggagttccagactagcctggcaaacatggtgaaaccccatctctactaaaaatacaaaaattagctgggcatggtggcgggcgcctgtaatctcaactactcgggaggctgaggcaggagaatcgtttgaacccaggaggtggaggttgcagtgagccgagatggtgccattgcactccagcctgggtgatagggtgagaatccatctcaaaaaaaagtttagctaggtgtggtggcacctactgtcttagctactcaggaggctgaggcaggaggattgcttgagcccagagatttgaggctgcagttagctatgatcgcaccactgcaatgcagcctggggaacagtgagattctgtctcaaaaacaaacaaacaaaaaacaacaaattaagtaatgcaacataaatatttaaagtaatattgaaatatatagaatatcttttttattttcattattttttattttttgagacagagtcttgctgtccccaggctggagtgcagtggccagaacatagctcactgcagcggccagaacatagctcactgcagcctcaacctcctgggctcaagtgatcctcccacttcggcctcctgagtagctgggaccacaggcgtgcaccaccacgcccggctcattattattattattattattattattattattattattattattgagacaggatctctctgtgttacccaggctggcctccaactcctgggctcaaggcctcctccggccttggcctcccaaagtgctgggacaacaggcatgagccaccacatctgaccttctttttctattaatgtgaaatattttaagatctgacccagggacgcgcgctcggacatggtcctgccccgctgaccgctgtcttcctcccacccgcaggcatcggcaagaacgtcatctgcgaccgcacggccacgccgctggacgctttccgcatgacctcggccgcccactactaccccaagctcatgagcatcatgggcaacgtgctgcgcttcctgccggctttcgtgcgcatgaagcagctgatcgaggagggctacgtgggcgagccgctggtgtgtgaggtgcaggtgcacggcggcagcctgctgggcaagaagtacaactggagctgcgacgacttgatgggcggcggcggcctgcactccgtgggcacctacatcatcgacctgctcaccttcctcaccggccaaaaggccgtcaaggtccacgggctgctcaagaccttcgtgaagcagactgaccacatcaagggcatccgacagatcaccagcgatgacttctgcaccttccagatggtgctggagggcggggtgtgctgcaccgtcaccctcaacttcaacgtgcccggcgagttcaagcaggatgtcactgtggtgggctcagccgggcgcctgctggccgtgggcaccgacctgtacgggcagcgcaacagcgccccggagcaggagctgctggtgcaggacgccacgccggtgagcaactccctgcttccggagaaggccttcagcgacatcccctcgccctacctgcgcggcaccatcaagatgatgcaggcggtgcgccaggccttccaggaccaggacgaccggcgcacgtgggatgggcggcccctcaccatggccgccaccttcgacgactgcctgtatgccttgtgcgtggtggacaccatcaagaggtccagccagacgggcgagtggcagaacattgccatcatgaccgaggagccggagctgagccccgcctacctgatcagcgaggccatgcgccgcagcaggatgtccctctactgttagcacagattgagaacctcggggacttgagccttctgcaggggatgtccacagagagggaagggccgaggggagagggtgaccatggggaatgtggggatcagggaggtggagggacagtgtgaataaatggcatctaggaaggtaaactccaatcccggtgaccgaccccaaaccagactgttggtgggctgagctcctagcctggaagcattcaggagagcctgccattcctgggatgatccctgctgggtatttgcacgagagtggtttggtttagctgcctctgctgccctttactgtgacaagcaaggaggggttgcttccctccctacctcatccatcccacacaccttggccttctgcaagccaagtggttctgcaaggtcaaggcactagtatcagatggcaagctcagtgcccgggatacccactgctggcaggagaaggcccattttcacagtccacagaagcgtgttaggctggggttgggggtgggatgggctggtgagaaagttcaaattccaggaagccactttttattggatataaggtatctaacggcaaaagtacttagtagcaaagtggccaccttttgattgattgggcttcctcataggaagcactgagggtgtgtctttgtacttggttcattgcccttcacctggtagagaaagagaggtcagaaatagcaagcaaaaagcaggactcccaggagccacaagaaaagagcacaggctgcaccaaagcaggggcagcagagaataaaatatccctttgaacttgtcaacaattaaaaaactgcaaggagtcaccttataacactatttccagtaaaggtggaattgagtatcagagggattactgcggtgttaaggtagccctgccacgtggctctccaggcagggccaagaagacagcacaaagtatgggtttggccataagctcatatgctgcccccaaagactggggagagctgtgtgcctcagtgttgcagtgtgaattcctaaatagagggtaaagtgagcctagccaggaggtgtttggggctctatcgcgcatctctcctaccaagctgggcaagagcttttaggagattcatccagctttgtggatttagaaaggaagccttcagttccaatcagaatcctctttccttacaaaaaaaaaaaaaaaaaaaaaaaaaaaaaggattttccttagctccagcatttgctttcaggattctgacacctgagaatttgggggtaggtactaaacgaaacaaaacaaaaggacaacaaggaacattatttctagtgtttctaaaatgggggtttagaaccccttaaggggccatacttaggcttgaaaaggctaatgttggaaaaaacatgttcttctaattggtctgctgtctgtcttgtccttgcacactctgcttacagagttttgttagagatgctgaactgcaggctgggagcaggcagtgccaaaagggaacagacacacacacacatgcacgtgcacacacacacacacacacacacacacagatttttgaatggttgctaccgacaaatgtcgctgaaaccattctttaaaaattcagatctggtcttgaaagaaagagccaatcaagtgcattcagagaacagggaattatcctttgttatctttgtttaattcttcaccccacgtaagacatttgtcaagtgtggacgtggaagccattcctcataagtctacgtagcttttgttcacaggctcactgaagtccaacaggtgtctttacatgcaactgaggtttagagttcttttcagatagctgccattggaactagaagggaatctaagaggactggagtccacctccagcctgtgtaggcaaaatctgagaatgaacagcccaatcagttgcatccttcattgtcctccctagggtcaatattctttgaagcccaggctactcataggtgcaagtgtggtgtgtccaaacacgaggggaatgctgggcattttctagaacagagaagtaagtactgccttcctggaaagagtcgccctgcttcccgaggctttgctacagcactgcagggtgggtaagctgaaattccatgcgtggtttgttgtggtccctgacctgttgctgacagacttcatggtcagcattccagctcttgcagctatcagttccaaaccagagatttgctggaatggaagtctcccaataatagtttgaacagaggcccatgtcatggactgctttggttcacattcttcttctttttttttttttttttttgaaatggagtctcgctctgtcacccaagctggagtgcagtggtgtgatctcagctcactgcaacctctgcctcccaggttcaagcgattctcctgtctcagcctcccgagcagcagggactacgggtggctgccaccacagccggctaattttttgtatttttagtagagacggggtttcactgtattagccagcatggtctcgatctcctgacctcttgatccacctgccttggccttgcaaagtgctggggttgcaggcgtgagccaccacacccagctgattctggttcttctaaattgctccctgggaaagtagtttttggggaaacattggaattattattattattattttctagctagcctgaagggctccgattaaggatgaagggaaagtaaacaaaatgattcaatgggtttcatttttctaagtcattcataacctaaatagggatattcctggggtttcaattgtatgtttctgtactaaaccataatactcgcgaaatcttttcccaaaacttcgggttttggagagaggtccccacaaaggcctctaagctctgtaatacatatttaatgtctaaaacaaaaaatctcatttgaagctggggtattagaaagaacatatattctttaaaagaggcatgaaaaaatattttagtgtgtgtactcaaattttatctactgaaatgcatgtagtaggtaggtgaaggaacaagagaaagaaaagaactggatagttcattttctttaaatataaactgtagcaaatgggtttgagatactcctttagtgctccatttgcccttatcccaccacatgcaaagacttgatttggggtagctatatgaagctgaaatctctagccttcaacagtgttctgcagaaggactttgtttcagcccagcaccgttcatcatgcctttaggggtctgggtacccacagctgactttgacctaggactaaaacccagcaatcttttggctcctttctgctttgtttaatgtgtttcaagggcctcgatgcaaggaggcagtgctttaagagtcttcccatttagttcctgcatgcctgtttcgttcccatcaatgtgcgaatggcctagattccaagttatgagggagggtgtgggtcagggttcttacctggtatttaaaaaatgtttgggagtgccctgggcctatttgaaaagtttgaatctgtgatcactgtcagctcctccaagacttctcctctcaacagacaattgcattgtagggcaccccagaccccccttagcctacatggcagcaaataccactgtgccagttatatctggactctagggtagtcttggccaactccaagactggccaactccaagacttgtccactgtgtgcagagtattttaagtatgttatctcatacaatccataaaaacaaccctatagtgttgggtattgctatttcttttatacacatgagaaaatggaggcagtaagaggaagaggaacttgttcaaagtcacacaactgttaggcagaaatgaggtcattcaaatccttaatcttctcctccagaccacactgcctcccaggaagagatgtgggcacctcctgttcttgccaggcaggaaaccgctccttatcaatgtctacggggtctgctctcacacccaggaaggactgtgacaagcatggactaacctgcggctccactcagcctgctgtcagcaccctcctgttcagcaggatgcaacatctgatgttctgccaggaggctgtagagctgcacatagaagtagccagtgtttcttcccattccaaaatggaaatatcactcagccttttttaaaattgacttcctatgttcattttgattgtaggtgatgcagcaagcctcagggctggggattttcaaaatcttgttggctgactattatagatggccttggaatttgctcttgggggtctgaatataacgtaggaaaatgtcctttctcagggagtggggctttaaagttcgtttgtttgtcactccaattttagctgtgcactgcacctttctttgcacccctactctcttcatcttgtctcatagccacagctattgaatttggcctgtgatcataagttgggtttctgatctgatctcttgcattctggtgggtactgggggcagaatcagctttgttaatgattttctgggcagaaggtaaattcagctgcatctgaaggggcttcacagtccaatagccgtccttttgttttacataacagagagtgatggtcaaggccacccacatctttagtggtagagccaggacaaaaagtcaggttttctgcctcttaagtctcatgctgcctcacatagcacctccagagctctagggaaaggaggctcagagagatgaagtgacttgtctgaagtcctgtggctagtggcagagaagttggaattagacctgcattggacctcaattcgctgagcagttgcagggaaatctggaaatccttttttttttttttttgagacagagtcttactctgtcacccaggctggagtgcaatggcgtgatctcagctcactgcaacaccgcctcccgggttcaagcgattctcctgcctcagcctcctgagtagctgggattacagacgcacgccaccatgcccggctaatttttgtatttttagtagagacaaggtttccccatattggtcaggctggtcttgaactcctgaccttgtgatccgcccgccttgacctcccaaagtgctgggatgacaggcgtgatccaccgtgcccagccgggaaatccattttttaaaataaattcaattatgtcttgaatgtactcagaaaacgagctgtttaaaatgtcccattgtgactgtaatgtgaacaatgacctctaacttgtattttatttggcaaggatgggggatgtgcatcaaatcttcacctctgggatttcctgaggcttggtctacttggctcaccctccacctgcatccccaccccactcctagatattaatacaaatctagccttgacaccgcctactgctccaccaccgcctacgtttttggccatcagagccttggagtttacagagcagaggccatgacattggggagcttgtttaaaaatcaatgatcagaaccccacattttagtttccttttggggagaaagaggagggccgtggaagaaaaggggtgtgcagctggagcgttattatgtctttctcagcggcaggcatgcccgcctctccaccttctccccgccaggcacaggagccagcagctggagcgtgctctgagtttcaggggaccccccacccagactgactggggcttctgggacttctcataggaagagtcaagacctcctgcgcttctttaaaaggtgatgggctcagtgttcccagtggcatctggaggtgaagccggtactgtctcaggagtggaaggcaatggcccactggcctttttctcccccacgtcacagtccccatttgctggagcccttgagggggccaccgaaactgtggctctcattcagcctcccaaagtgttgcactactgaatactcctttctgtttacaccagcagtgaatagagtcatgaaaagaacatattatatgcaatggcttgatgcttagtgtggcaatcaaaagcttgcctgggcagatgtaggcaggggctagacaatagtcatggagttgtcaccaggtcactgtctctctccttccccttccaggtctctactgtcccctgcagccaccacaagggctaagctgttgaatgagccccttggtttttccttataaacgcaatgacttacttgtgattcttggtctaatcccaggctaagaaacaaaacaaaagcttgtgatctgacccattcctttgctgccttccttctctttcaggcacctggacgtatttagtattctgccctgtgccttgcccaggggagggagaagtttctagcaaatgtggctttctgtctgctgcctggtgcttttatagtacttcatctgctttttattgttgttgttgtgttttttaaccaaaatggcatttgtttggctgtcattgtcgagtatatatttattgtgttttacaaacatgagtatatatgtatgtatatgtataaaaccaaacttatatatataagaagtcaaggcatgtatactagatattttaaagagttatttatcaagggaaaaagatgtgtgttataaagtaaacagagtctatattttctatataatgtagatagtcaaacatagcttataaattataggaggttttggttttcttttttattattaaaggaaaaaaagaagaaaaaaaaagacaatgaatgcaactgttcttagtgtttttaaggccaaactactgtggaagctgggaggcggccctccctgcgggcctccagcagccctgtgcctgccgctaggagctccagagctgatgcccgttgtgatctctgcgatgctcgatgctcggagccagcggtcagcatcactcagccagctggcctgtgccgctctgacgtggcttccagctgttctccgcaatttgcattggtgggataaaggaatgaaaaggataaataaagatttaaaagaaaatacaattccagctctttgcctgttttttacaccctgctgctctcaatataggcgcctgatcagtttgtgggatctgaagcatgaatgggtgcatccaaggtagaggggtgtgggtgcctgtggtgtttgtgtgtgtgctgggggaggctgttcatgagtcagcatccatgaagctgaacaatggaaatcaacagacctacaattttgattgaaaaccaacgcgtgtgggaactggaggcacttcaaagccatctggttcaaaccctcattttggaaatgtgaaaatgaaaggcaagtaacctacctatggcctctgggtatgtgtttgtgtgtccaaagctagtgtggacaaccaaagctagtgtagacaacaagaggatgagaacatagctcttagattgggggagcaaattttagaattctctagaattctctagtattttaacactgtaacctaatacttcacaccaagcactgaaaaacaatttttttttttttttgatacaggatcttactctgtcacccaggctggagagcagtggcatgatcacagctcactgcaccctctacctcctgtggctcaagcgatcctaccactttaggctcttgggttgctgggattacaggcacatgccaccacgcccagctaatttttttttttctgtattttgtagagatggggtttcatcatgttgcccaggctggtctcgaactcctggactcaagcgatctgcgtgcctcagcctcccaaagtgctgggattacaggcatgagccactgtgcccagcactgaccatttaaaagagcgtctttgcttacttccttcttagcagtgtttaagggcaaccatcgcagattgagctcagcctaatttcaaatttgcatgacatagagtgttttatggaggggctggcctttcctttctatcttttgctgagtcttagagaatgctcatgaatgttccttctggtctatggtttccccttcacttaaaaataagaattaatactgcaaaatctgaaatctcattcactccttcatgagcaggtcctgatataaatacatccagaattcagtccatctattatgataacattgtagcaaccccctgtatccacatagattattgtcttgaacatatgacattctcataccacatgattctgcagtaaatctaacagcagttctaaataaggccaaaaaggagagtgctttgtcaaaactaaaagcaccatccacccaaatgtgaagtgtcatcacgatggcatccattcccctaagtttctttcagcaatgtgacttgagaaccaaccctcaatgaaaactcgaatctcctaaccagttatataaattttaaatctaggagctagttcttctttcatggattttggattctctttgtgatgttggtttgtctcaatttagtcccatttcttgctttgtaaacctgcgattatatgcctcctagtaaaccacatgatatgatcagcgctgctttcatagtctctgaactgttgcttaaaaagaacagatataattgcatggtaagtcattcaggttgctctttactggtgaaatgaagagaaacctgggtgtcctctgatgtctgtctatacaccccacctccctgattcacagaaccattttccggtttcacttcttgcttcttttatcttgtgcatttttagcacctgttgtgacaagcctgggtgactcgatctaaaaaatgaaatgacttacaattactgtaagaatgaattacagatacatgatgtatgcacaactctgtatagaaatgaaaacaaaaataacttcacctcactctaattcataggctaccatgttattgacccttatttacctaacttttgcttaagcaggaaagatccctctgcctagatatcccctgggcttggcgccctcactcctccaccccagcccttatgcatttggcagtagtaatggcccctgcagggaatgttgtccaagaagtctagatgatagagatgaagaaggcacatcacttcacagagtttatgccaagtcaccgccagaagcgcagtgttacaatttacttaagccaagactgctacaaaaaactgatgcaaatggaagctattcaaaatcctttgccttgtgcattcaagttgaggctcccttttgaatcctatctctgagtctacatctgctgggtaaattcctgaacgatgacttgagctgtgacagcttttgtagcattgctgtggtccaaccacaactctgtaagataaactacctaagctggttgttggacttcctctaaaatgtcattctaattatagaaacacctttctttcctgattttatacagattctaatcaccttaactgcttctcttcagccatgaatgaaagcgaaagattaagtcacttttagaagccttcttgggcaattatagattaattcatttctcgctcattgaagggactcaatcctagaacaacagtctggaatacatgtgtatgtatgcccctttgtctctgacctgctcatcattggccatcaatgccctgggaaggagggaccctaggaaggcctgaggggctgcacctgatgtgcaggtcatgtgcacagaccccacaggttcaggctcagtgttgaaattccctatgtcattaactcccttgtaggaaggatgaaagggtctagatcagatttaagtcagacataggctatttgaggcgcctgtgggaatggcaaatcactccagactcctcagaagcaaaggccaagcaggcctgagagctagtgaaactccagggagaggagcaagaccaggatctgcgctttctcagcttcccaaagctgtctgtctcggaactaacaaatgaggctgactcttcagagttctaggccaagggatccggacttgacactcaagtttctgccatgaagcaaaagacagagctagcctggaaagagcagctctgtatcactccggctgtgaagtgctaaaactcgacatctccctgaggaaacaggagagaagaaaggatggagagaaaaaaagagaggaaggagctggcattaatggaccagcaagggaaggagaagggagcaggaaaagcggtagttcacgtagggtaaattagatgaaggggaacaaacagcgaaaggtcagagggctctgcacttaaaataaggaagcttgtgaagataagtaaatgttgcctgagatatctgaagtagggttcctctttggctgacaagccttaatctgcactctggaaacagcttgtatgaggaggaggacggcagacaaggaggaatgagggaggaattcttacaggaaccatctggctgagtcacttttagggctgttcaaagctacccaactgttgacatttcctggaaattctttaatgccaacaattgtgttaaatgagcaacatccttaagaccccgagtgcaccttggatcccctcgtcctttcttgttgcgtttgcgatttgcaaatcccctgaacctgaagtcttcaaggattcagcatctgccatttcaccatgtgttagtcccctccctgggccccttcaaacacactctccactcagaaatctaccatttagcctttatttatttatttatttatttatttttgacgcacgcacaaggcttctcactcctcctcagctttcaaagaatccacccactaggctgtcacttcaatctgctgtctcctcctgcagcacagaatttctgaagaaagtccccaggtgaaccagcctggccagcagaaatggatgctcacccactccatctagcccctggcctctgctctcctggactccctggctcagtcctcagatcagttccggaacttctctccttaggtttcctgtaacatccgggtttctcccttacttgcttaaaacaacctcttgctttcattcatccattcattcactctgaggccatctgaggaaagcttccttacctgctttcctgatgacctaatatatgctgtacccacctacttcctcttccttgaatggggaaaccaagtcacagggaaagatacatctctcccttctaatgctggatctcattccttacaagcctgctctcattctccacctccaatctctctgtgtccattcttctcttcttttcatccgtcagttatgccagtggctcccagcctggagtatgaatctgggggcaggggtgtctctgaacttaggtggggaaaaaaatgcatctttattttcact

SEQ ID NO: 1618 - DNA, 2996 bp, Homo sapiens
gagcgaacatggcagcagaatgaggaggctggcgccgggtcgtggccgccgctgccgcgctgcagctcgggatcccagtccggcgcgctccgggccgcatccttagccggcctcctggcggccgcgggattatttcattcccaacggagagctagggagaaaggagactcccccgcggagcggttccgtgctctggcagggtgtagacgtttgtctgtgcgattcgccggctgcgcaaacgacgcgggagagagccggtcccgggctgcggcggcgcggccgcggggatgagccggccatggagcggccttggcggggcgcacgcagcggactggcgctgccgcgggagcgcagcctgagccggggctccagggggcttcgaagcctccggcgccctgggggggtccctgccgccgactccgggaaggacgcgagccccgcgtggcggacactgccgcagtcaccgttctgaggcgccccgagcttgctccgcctgcagctcggtgcgctctgggcacccgggcgccttgcccggtgcacggcggctggcgcaccgcggctagattggctacaggagcggggtgcaggactggctagaggtgggtgtgtgcgcgcgttggactggagatccgagcagaagcagaaccaggcggctctgagcagccatgcttcccggggtgggcgtgttcggcaccagcctcacggcccgtgtcatcatcccgctgctgaaagacgagggcttcgcggtgaaggcgctgtggggccgcacgcaggaagaagcggaggagctggccaaggagatgagtgtccccttctacactagccgcattgatgaggtgctgctgcatcaggacgtggacttggtgtgcattaacctgccgccgcccctcaccagacagatcgctgtcaaaaccctaggcatcggcaagaacgtcatctgcgaccgcacggccacgccgctggacgctttccgcatgacctcggccgcccactactaccccaagctcatgagcatcatgggcaacgtgctgcgcttcctgccggctttcgtgcgcatgaagcagctgatcgaggagggctacgtgggcgagccgctggtgtgtgaggtgcaggtgcacggcggcagcctgctgggcaagaagtacaactggagctgcgacgacttgatgggcggcggcggcctgcactccgtgggcacctacatcatcgacctgctcaccttcctcaccggccaaaaggccgtcaaggtccacgggctgctcaagaccttcgtgaagcagactgaccacatcaagggcatccgacagatcaccagcgatgacttctgcaccttccagatggtgctggagggcggggtgtgctgcaccgtcaccctcaacttcaacgtgcccggcgagttcaagcaggatgtcactgtggtgggctcagccgggcgcctgctggccgtgggcaccgacctgtacgggcagcgcaacagcgccccggagcaggagctgctggtgcaggacgccacgccggtgagcaactccctgcttccggagaaggccttcagcgacatcccctcgccctacctgcgcggcaccatcaagatgatgcaggcggtgcgccaggccttccaggaccaggacgaccggcgcacgtgggatgggcggcccctcaccatggccgccaccttcgacgactgcctgtatgccttgtgcgtggtggacaccatcaagaggtccagccagacgggcgagtggcagaacattgccatcatgaccgaggagccggagctgagccccgcctacctgatcagcgaggccatgcgccgcagcaggatgtccctctactgttagcacagattgagaacctcggggacttgagccttctgcaggggatgtccacagagagggaagggccgaggggagagggtgaccatggggaatgtggggatcagggaggtggagggacagtgtgaataaatggcatctaggaaggtaaactccaatcccggtgaccgaccccaaaccagactgttggtgggctgagctcctagcctggaagcattcaggagagcctgccattcctgggatgatccctgctgggtatttgcacgagagtggtttggtttagctgcctctgctgccctttactgtgacaagcaaggaggggttgcttccctccctacctcatccatcccacacaccttggccttctgcaagccaagtggttctgcaaggtcaaggcactagtatcagatggcaagctcagtgcccgggatacccactgctggcaggagaaggcccattttcacagtccacagaagcgtgttaggctggggttgggggtgggatgggctggtgagaaagttcaaattccaggaagccactttttattggatataaggtatctaacggcaaaagtacttagtagcaaagtggccaccttttgattgattgggcttcctcataggaagcactgagggtgtgtctttgtacttggttcattgcccttcacctggtagagaaagagaggtcagaaatagcaagcaaaaagcaggactcccaggagccacaagaaaagagcacaggctgcaccaaagcaggggcagcagagaataaaatatccctttgaacttgtcaacaattaaaaaactgcaaggagtcaccttataacactatttccagtaaaggtggaattgagtatcagagggattactgcggtgttaaggtagccctgccacgtggctctccaggcagggccaagaagacagcacaaagtatgggtttggccataagctcatatgctgcccccaaagactggggagagctgtgtgcctcagtgttgcagtgtgaattcctaaatagagggtaaagtgagcctagccaggaggtgtttggggctctatcgcgcatctctcctaccaagctgggcaagagcttttaggagattcatccagctttgtggatttagaaaggaagccttcagttccaatcagaatcctctttccttac

SEQ ID NO: 1619 - protein, 390 aa, Homo sapiens
MLPGVGVFGTSLTARVIIPLLKDEGFAVKALWGRTQEEAEELAKEMSVPFYTSRIDEVLLHQDVDLVCINLPPPLTRQIAVKTLGIGKNVICDRTATPLDAFRMTSAAHYYPKLMSIMGNVLRFLPAFVRMKQLIEEGYVGEPLVCEVQVHGGSLLGKKYNWSCDDLMGGGGLHSVGTYIIDLLTFLTGQKAVKVHGLLKTFVKQTDHIKGIRQITSDDFCTFQMVLEGGVCCTVTLNFNVPGEFKQDVTVVGSAGRLLAVGTDLYGQRNSAPEQELLVQDATPVSNSLLPEKAFSDIPSPYLRGTIKMMQAVRQAFQDQDDRRTWDGRPLTMAATFDDCLYALCVVDTIKRSSQTGEWQNIAIMTEEPELSPAYLISEAMRRSRMSLYC

SEQ ID NO: 1620 - DNA, 2115 bp, Homo sapiens
cctgccccgctgaccgctgtcttcctcccacccgcaggcatcggcaagaacgtcatctgcgaccgcacggccacgccgctggacgctttccgcatgacctcggccgcccactactaccccaagctcatgagcatcatgggcaacgtgctgcgcttcctgccggctttcgtgcgcatgaagcagctgatcgaggagggctacgtgggcgagccgctggtgtgtgaggtgcaggtgcacggcggcagcctgctgggcaagaagtacaactggagctgcgacgacttgatgggcggcggcggcctgcactccgtgggcacctacatcatcgacctgctcaccttcctcaccggccaaaaggccgtcaaggtccacgggctgctcaagaccttcgtgaagcagactgaccacatcaagggcatccgacagatcaccagcgatgacttctgcaccttccagatggtgctggagggcggggtgtgctgcaccgtcaccctcaacttcaacgtgcccggcgagttcaagcaggatgtcactgtggtgggctcagccgggcgcctgctggccgtgggcaccgacctgtacgggcagcgcaacagcgccccggagcaggagctgctggtgcaggacgccacgccggtgagcaactccctgcttccggagaaggccttcagcgacatcccctcgccctacctgcgcggcaccatcaagatgatgcaggcggtgcgccaggccttccaggaccaggacgaccggcgcacgtgggatgggcggcccctcaccatggccgccaccttcgacgactgcctgtatgccttgtgcgtggtggacaccatcaagaggtccagccagacgggcgagtggcagaacattgccatcatgaccgaggagccggagctgagccccgcctacctgatcagcgaggccatgcgccgcagcaggatgtccctctactgttagcacagattgagaacctcggggacttgagccttctgcaggggatgtccacagagagggaagggccgaggggagagggtgaccatggggaatgtggggatcagggaggtggagggacagtgtgaataaatggcatctaggaaggtaaactccaatcccggtgaccgaccccaaaccagactgttggtgggctgagctcctagcctggaagcattcaggagagcctgccattcctgggatgatccctgctgggtatttgcacgagagtggtttggtttagctgcctctgctgccctttactgtgacaagcaaggaggggttgcttccctccctacctcatccatcccacacaccttggccttctgcaagccaagtggttctgcaaggtcaaggcactagtatcagatggcaagctcagtgcccgggatacccactgctggcaggagaaggcccattttcacagtccacagaagcgtgttaggctggggttgggggtgggatgggctggtgagaaagttcaaattccaggaagccactttttattggatataaggtatctaacggcaaaagtacttagtagcaaagtggccaccttttgattgattgggcttcctcataggaagcactgagggtgtgtctttgtacttggttcattgcccttcacctggtagagaaagagaggtcagaaatagcaagcaaaaagcaggactcccaggagccacaagaaaagagcacaggctgcaccaaagcaggggcagcagagaataaaatatccctttgaacttgtcaacaattaaaaaactgcaaggagtcaccttataacactatttccagtaaaggtggaattgagtatcagagggattactgcggtgttaaggtagccctgccacgtggctctccaggcagggccaagaagacagcacaaagtatgggtttggccataagctcatatgctgcccccaaagactggggagagctgtgtgcctcagtgttgcagtgtgaattcctaaatagagggtaaagtgagcctagccaggaggtgtttggggctctatcgcgcatctctcctaccaagctgggcaagagcttttaggagattcatccagctttgtggatttagaaaggaagccttcagttccaatcagaatcctctttccttac

SEQ ID NO: 1621 - protein, 287 aa, Homo sapiens
MTSAAHYYPKLMSIMGNVLRFLPAFVRMKQLIEEGYVGEPLVCEVQVHGGSLLGKKYNWSCDDLMGGGGLHSVGTYIIDLLTFLTGQKAVKVHGLLKTFVKQTDHIKGIRQITSDDFCTFQMVLEGGVCCTVTLNFNVPGEFKQDVTVVGSAGRLLAVGTDLYGQRNSAPEQELLVQDATPVSNSLLPEKAFSDIPSPYLRGTIKMMQAVRQAFQDQDDRRTWDGRPLTMAATFDDCLYALCVVDTIKRSSQTGEWQNIAIMTEEPELSPAYLISEAMRRSRMSLYC

SEQ ID NO: 1622 - DNA, 1527 bp, Homo sapiens
cgcctgaataaaaggccgcacacgtgtgtcgggttttcttgggtgcgatagaggacctgcccttcagcagcggtggcgccctgctagggtcgtttgtttctttctgctgtgagttagtttagcgtgagattgcagatgttaccatcggctggaattatttcgtctgcgctggagaaccaggacatcagaggaagaaaatcagcagacagaaaaatactggggaaaaaaaaatgccacgtggttctgttcagctgagcttctgctccctccagcacccccacatgggacatttgtttaccccccacgatgctgctcttggagagtcccaggggacaggtttcaagcccttagggatgcagcctgtctaacttaatatgcacagccgttcacatccagggcacagaggcagcctggctttccctggaggcccacggggaccacaatgctgcatttgtctgtggaactgagatttagctgcacattcttgcctgaatgcagcgggcctccagccacagcctgctggcatgggggattccaggagggatgtgcttcatgagccggcaattgcccttctttccagtccccagacccagtcaagattacagatagatgcgttcatcgcgcgcaggtgctggggaagccagtgggacatcactggctacattcaccaacaggattttccaactgcagtatttatcggtttttcaaacgaattcaacatctgtattcctcacccatttactgagtggctacaatgtgtaaggaaatattctcagtcatggggagttagaaaaggtcaaaggcatataagatatggcatgtgctctgagagaactcatcatctatccagaacctactcatcacttttggaaagagaagagaaactagcattctatggagtacttaccatgtgccagatttggagtgagacatagtacgagtgttactcatttacgtctcatggccaacctccaatgtggacatttagcatctccatcttacaagtgagaaatttcactgtagagaggttaaatatcatgtgtcattgattctgtgacatgtattattttcacatttgaacatctgaaatatagatatgtctaaaagggcttttctttcttggtagtaagataactgtaggtctttgcagtagtgtcttagattatgtgaaatatggtattttggcaagtgtacatggctaagaacaagtggaatcagaattcaacttaagtttgcttgactccaaagcttatgtgttttccagtataatgtgctgcagtatcaatggtctgtatgaacaaaggccatatcatttttattgacaaagtatagaaacggggaaatggtgactgaactggaacttgcatcatctaattccataactgaggagacaatagcctggggactgcatgtatcccacaggatgttaaaaaattgagaaaatgttatttcatgatcttcacttctctgttgattataacttatttttgaagaggctaaaataaatggcaaactcttgtatggata

SEQ ID NO: 1623 - protein, 134 aa, Homo sapiens
MGDSRRDVLHEPAIALLSSPQTQSRLQIDAFIARRCWGSQWDITGYIHQQDFPTAVFIGFSNEFNICIPHPFTEWLQCVRKYSQSWGVRKGQRHIRYGMCSTHHLSRTYSSLLEREEKLAFYGVLTMCQIWSET

SEQ ID NO: 1624 - DNA, 1996 bp, Homo sapiens
gcggccgcggggatgagccggccatggagcggccttggcggggcgcacgcagcggactggcgctgccgcgggagcgcagcctgagccggggctccagggggcttcgaagcctccggcgccctgggggggtccctgccgccgactccgggaaggacgcgagccccgcgtggcggacactgccgcagtcaccgttctgaggcgccccgagcttgctccgcctgcagctcggtgcgctctgggcacccgggcgccttgcccggtgcacggcggctggcgcaccgcggctagattggctacaggagcggggtgcaggactggctagaggtgggtgtgtgcgcgcgttggactggagatccgagcagaagcagaaccaggcggctctgagcagccatgcttcccggggtgggcgtgttcggcaccagcctcacggcccgtgtcatcatcccgctgctgaaagacgagggcttcgcggtgaaggcgctgtggggccgcacgcaggaagaagcggaggagctggccaaggagatgagtgtccccttctacactagccgcattgatgaggtgctgctgcatcaggacgtggacttggtgtgcattaacctgccgccgcccctcaccagacagatcgctgtcaaaaccctagaaccaggacatcagaggaagaaaatcagcagacagaaaaatactggggaaaaaaaaatgccacgtggttctgttcagctgagcttctgctccctccagcacccccacatgggacatttgtttaccccccacgatgctgctcttggagagtcccaggggacaggtttcaagcccttagggatgcagcctgtctaacttaatatgcacagccgttcacatccagggcacagaggcagcctggctttccctggaggcccacggggaccacaatgctgcatttgtctgtggaactgagatttagctgcacattcttgcctgaatgcagcgggcctccagccacagcctgctggcatgggggattccaggagggatgtgcttcatgagccggcaattgcccttctttccagtccccagacccagtcaagattacagatagatgcgttcatcgcgcgcaggtgctggggaagccagtgggacatcactggctacattcaccaacaggattttccaactgcagtatttatcggtttttcaaacgaattcaacatctgtattcctcacccatttactgagtggctacaatgtgtaaggaaatattctcagtcatggggagttagaaaaggtcaaaggcatataagatatggcatgtgctctgagagaactcatcatctatccagaacctactcatcacttttggaaagagaagagaaactagcattctatggagtacttaccatgtgccagatttggagtgagacatagtacgagtgttactcatttacgtctcatggccaacctccaatgtggacatttagcatctccatcttacaagtgagaaatttcactgtagagaggttaaatatcatgtgtcattgattctgtgacatgtattattttcacatttgaacatctgaaatatagatatgtctaaaagggcttttctttcttggtagtaagataactgtaggtctttgcagtagtgtcttagattatgtgaaatatggtattttggcaagtgtacatggctaagaacaagtggaatcagaattcaacttaagtttgcttgactccaaagcttatgtgttttccagtataatgtgctgcagtatcaatggtctgtatgaacaaaggccatatcatttttattgacaaagtatagaaacggggaaatggtgactgaactggaacttgcatcatctaattccataactgaggagacaatagcctggggactgcatgtatcccacaggatgttaaaaaattgagaaaatgttatttcatgatcttcacttctctgttgattataacttatttttgaagaggctaaaataaatggcaaactcttgtatggata

SEQ ID NO: 1625 - protein, 134 aa, Homo sapiens; identical to SEQ ID NO: 1623

SEQ ID NO: 1626 - DNA, 202251 bp, Mus musculus
  misc_feature (1)...(202251): n = A,T,C or G
tccagtggattctcactgtatgtacaaaccacactgtcccagttagggttttactgctgtgaacagacatcatgaccaagaactcttcttataaaggacaacatttaattagggctggcttacaggtttagaggtccagtccattatcatcaaggcaggagcaaaacccatgcccacagtgatgcaccgaccccaataaggccatacctattccaacagggccacaccttctaatagtgccacttcctggtccaaacgtaaacaactcatcacacactcttcagggcagaccctttgcccaacagtagacagtcaacacaaaatgaaccaaatgctatttatctagtttttttgtttgtttgtttgtttcatattggtttgatttggcattttttatcttactggccttttgcttgtatattttggtttctgattttgagtttttatatgtgtgtgtgtttcttgtgccatttctttttaattgttttgaggaacagagagagagagagagagagagagagagatgggtggatggggaattgaggagaaacttggagaagatgaagatgaaggatgggagaccataatcagaatatagtgtatgaaaaaagatgtattttcaattaaaaatgtggtatccctagtaaagagatttttcaaatcttgctatagaagccagcaagtaaataaagtttccgatgttcaggaataggggaagagatcactgaagacttgaagctgacagggcagtgctgagtttacctctgttgccctaatgtgggtgtccgcgtccgtggggaagacagtggtatcaggaagttgaggttcagtaattttcatgacatttaaatttatgtctttggcaatggcaacatttgatgaataaagttcagggggaaattaagagcagacaattttgaaaaggaaaagaaactgctaatgtctttcgtgtgcattgtctgctattgggcgacgttttccttttcttctgcccagagccagctctgtctcagctaagggctggtttgtcagcctagaccacaaaacacaaggcctgagagctgagccagaccctgtgatgatggatgttcatggggaggaggtcctgagctttgtatgggtgctggtcaccatggagaacccagcccagactgagggatgctgtcgcttaagctagatttacagaaagcctcttaggaagtattcgcttgccctggaatgaccttttgattctctgatgacttaagccatcagcagtttttaggtcatcctgacagcctactactacccactgaaatggcttctgaacccagtctcatagaagtcaggtgaggcgagagttcccggatgcctgccatcagctgtcttcagaaaccacggctttctagtttctaacggaaaactgtgccagctagaactttctagcaaataagtatacatgcaagagctcgtagggaaagcagtccgctgaccagcagacatacgcagcagtggttagccgtggcggattttagggtatgcagaagtagtttttttttaaatgtctgggccaaggtgtgttatggggagcagtcactatctgtctcatagcctaccccaatctagaggttccctctagaaaaaccacatgtctcccacactgtagtttgtgatctggtttattctaggcttcttttcctcagactgactccaggataagctactatctgtccagccccagagcagtgcttctcagccttcctaatgctgcgatcttttaatccagttcctcgtgtcctggtgacccctaaccataaagtgaattttgttgctacctcataactgtaactctgcaactgttaggagccataatgtaaatatgtgttttctgatagtcttaggtgacccctgggaaagggtcattggacccccaaaggatggggacccacaggttgagtattgaaccacactcaactagagcgggcctaaaccttctttgctttgtgctgattatttcagttaactaaacagagataagaaaagtaaaacaacaaaccaaattagagagttacgggttctctgtcggagatacacccagacagaccctgtggccttcttagtcaggtaactgcttaaatctgtacttctggctgtctttgaggtctttggtggtgggagatgggggaacacataccttagcccttacaatcgaggaagcttaaagtacccattgtagctgagcaagaggtatgtccgtggcctccagtggatgatcagctgtgctgaggggctctagggatggagggaaacataaccctttcggggttggttttgaggccataacgctgcattccgtgggaacttgagcagtaatgggaggtgactcatctactttgagtaatccgggctcactgaaggaagggatcctggatcaatgaatagtagttgatgttggggctcgggcaacgcctcatcacccgttaagaaaacacacccctcttgcagaggaccagggttttattcccagcatctacatttgtaacttttctggcctctgtagcactgggtgcaatgcagttgcttatatccgtgcaggtaaaacacacatatggaataaaaaaaaaaaacttttaaaaatgtagtgcacatgatgataatggtggtgatgatgatggtggtggtgatggtggtggtggtggtgatgatgataaatataatggtgattctgacaataccacataccagataacacccgctctagttgagtgtggttcagtaatataagcaccacaatcaatgtcattttagagctcaggaaatggagggaggtatggggtaaggacttaaataaggtcacacagttttcaggtggccaagttggagtgtaaacctggactgcaagacccctcggggagttcttgcccttcctgatcttggtacctttcatgccccttcaagtttatcatgtatgtatccaactctgcttatcccctcactgaaaggggttcagtggaggagagctgaacgaaaggcagacgggcagggtctgcactggtttgtgggatttactggccaacgctggctgtcccctgagcatcccgtgtctcctccatttcgatctacctccccatgttaactccaccctcaccacaggaactcagaggcagggacacagctcatccttggtgaggcctttgtcagccacttttcttattgctgggatcaaatacccgaaatatccagcgtggtggctgggggtagggggtggggggtggggagcgtgcaggtttattttggctcacggtttgaggggatagagtccacagtgacatgggaggctcagtagctggaaagtggggtcacgtgtgtcagcgctcgctcaggaagcagaaaatggtgagtgccaagtacctatgccatccggccttctccatttccctgttgcatctggtctgggccgacagaccttgggagggcgctgctcgcaattaagttaatcctctttggaaatgccctcacggacacagccgaaagtgtgcctcctcatgcacaaggtgtgctttagtacaaccacgctgactaaaactgctgaagcatcgcaacctcgggatttgaaggctgcaaggtttgcaaaagtccagagagccctcttttccctaaacgcccctgggcaactgttctgcagccctctttcagggcaatttttgtggcctgccagggagaatgacagcccagctactccgtggctctcaggatgactttcaggagggaccagctcttcacagtcggtgatgagaacatcgcaggtctcaacggatcttatccccacggccctatacaggagatactttcattactactatctctctatcatatgattttaaatgagggaaccgaagagttcctccagatttgctggcccagaaagggaggtttccaagttcatacctgacattctgcatgcaagagctctaccctccctcaccacccctggaatttcagactagattcccagaaggaagagtctgacaggctcagtatgtggcaggaattactgtactgagcaggtgggggcagagggggaaagtagggtcacatagcacaagcatagctgtacgaggagccgaggggtgggcaatgtgggggagggaggaacggcagttctcagaatggaatctcatacttcatgtgtggtgggagtccggattccctgctagttactcatgagccaatggaagattaggtcgtttcaggctccttgttagcaagtgaggtaagccacgccttccgaagcctttctttttggtagggagctgtccagggagaatggctgggacagtagaaaggtatatcatgtgacatgacattttccagaaacaaaacaacaaaagccaactgactgtgacgaatatgtgtccttcttcaagtataactttccacacttcctcatggagataaggagctttggtcctctgcttgaatctaggtggccctgtgatgacagccgtaggatttctgcagttgggtcagaaaagatgggagagattctactggtccttcaaacgcttacacttggaacactgcctaccgggtagttagcctttggtcaccgtggacagaacatctgagataaacaacctataaggaggacttagggcgttagaggtttgctggcttcattgattctgagtctatggtgaggtaaccatcgtggcagagattgtgtggcagagcaaagctggcggtggtcacaaagccaaaaggaaggaagatggaggcctgcattctaatgtaatcacacctagggtgcccagacttctttctgctagtctcctaaaatttccatcaggtcccaatctcgccaccagcgtggggaccaagccttcaacacatggggtttggaagctattcgagatctaaactctatgcagagaggccatagagggaaagcgaggtgagaggcccttgttcagctacatcgcccctcccccagctgttccagctccctctgtacgcactgatgataaaactagagccggacctcctcactactctctggaactgggagggctgcggtgactgtcatttagagttgctaaagtttgggcggagtgggggtgggggtgggggagtggggttgcggggagcagcagagctgttatgtaacatcacgtgctgattcccagaggtctgcagaggaacgtgaacctgcagatacctgaaggatgtgttgtgtgaagagacaggctggaagtgtagagctgtgacgaacagcactgagagcaccagttgagagttcttgagggacaaatgtggttcctcacagaggccttctctgagaacggaacgttcaaacgagtcacctgacagcggtatgcttggaactggagattcaagtggaagatgcagggcaactttggggggtacggaagaagaggtgagaaggttttcaaagacacactgatactcttaaaagccataattatttttattatgtttattttcgtgtgttttgtgtgtgtgcgtataggcacatgtgatagaggaatcagttttctcattccatcatgtaggtcctggagatggtacctaggttttcaggcttggcagtagcctgtatatatatgtatgtttggtttccagctgcagcatgacagcccagaactgccagagatgctggtaacaccagttccaggggatctgatgtgttatcctggcctccttagcccccttcactgatgtggaatgcatgcacaaataataatatacatatatacatataaatattttaaataaatatattaaattttagaatctagtatatatgtagtttatgtgtataagtattttgcctgtatgcatataggtgtaccacatgcatgcccagttcttgcagagttaagaaaagaatagcaaatcccctggaactggatttgcagatgtctgtgagtcatcacatggttgttagacatcaaacctagatcctttgtatgagcagtaaatgctcttaaccactgagccacttcccagcttccccagacatacttcttttttttaaattaatttattttttaaaatttattcacatttcaagtgttatccccttaccctgttccccttcttcccagaacccccctaccccaccccacccccagcgcttctatgagggtattcctccaactacctattctctcccacctccctgccctctattcccctacactgtgggacatctatcgagccttcataggaccaaggacctctcctcccattgatgcctgacaaggccatcctctgctacatatgcagtatactccttggttggtggcttcgtccctgggagctctggagcaggtataagtgatgataaactggttctgaaatgcacgtatttagtaaactctttgacggggtaaaaagtagatgaggctcttcaggtcccagaaggctggcggagtaggaagggccatttacagtggaactgtttaaccagccacacttaaaccacacccctcccaccttaagacctctccttatccacttagggtctttcctaattgtgcattcctctgcttgcttcacgcctcacatcctgtggcttgctaaatcactccactctcatctccacagtaagcaccctgcctccaatttgtttcttctgctccatttgcaatactgttgactttcttcaggccatcgtggcctctcatctggaagcctacaacggtcctctcaatggagagaagactgcaaatgaattaaagagacgcttccccgtcatattagtttgaaactccaaatagtcactgacttcatttagaacagatagacaagttctcaagaactagaggcatcgatgatggggctaggcttaaagtcctgggttcaattcccagcgtcgctaaaaacttccatgatctagtacagaatgagaaagaacatagacatgggtaaggaggagtctctctctcttctttttttgagatcggggttctccttctgcagcttaggttgccttagaactctcggtgatcctcccgccttagtgtctggagttctgggattataagtgtgttctaccatgtctggcttcttacccttgtttcttaaaattgtcactgtataatactataaacacggtgatataaaacaatcagaaatatatttgttccccagacctcctaggggccagacttccaaactcaaggtgctagcaaaaccacatttctcctggagactccagggaagaattccttcttgcctcttctagcttctggtagctcctagcagtcccctgcttctggctgcatctgtctagtcttatcttctctctccctggcttccttcctgcatatgtgtgtgtctggacaccaccccccctttcacaatagcactagtcattgaattaagaatgaattctaacccagtatgactgcatcttatttctgcaaagacattattttaaatgaagtcgtacccacaggctctgggggaatagagcttcaatgtatattttaaggatttattttcactttaggcatatgggtgtttgtgtgaatgtatgtatgtctgtgagcctgaggaggccagaagagggtataggatcccctagaactggagttacagatggttgagagcagctgggtgctggtgttcctgaaagagcagcaaatatccttaacccctgaactgactactgactctcagcctcttggatctcttggatacacacacacacacacacacacacacacacacacacacaattttatttttatgtgtaagggtatttttgcctgtacatatgtctgagcatcatgtgtgtgtacagtgccttcggaggccagtagaggatatagaatctttaggaccaggagttacagacgattatgaactggttccgtgagatgcctggcatgtaggtgctggaaattgaacccaggtcctctgtaagagcggcgtccattgctcttaactgctgagccatctctccagccctggatgtatctttttaaaatacccaacattctaaaattgcaactgttggaaagtgccagaacaacaatttagcatagggaagacaccttgcttattaaagagctctggaagaagcagacaaattttgagaataagaggtaatattcaatagagccagccagagggatttaaaaaaaatacaagaacatacataatcaaagaatagaattttaatttcctggctgttggatacaggaaagagtatatataggaagtaaagctagggaatttagtaagaggatgtctcagtaatccaaaggtgagaatcgagcctcaggggcctgtgaatcctgtggaagaaatagctcggggcctctagccaagagcctacaaaactgtctgtcgtgtcgtgtgtgtgtgtgtgtgtgtgtgtgtgtgtgtgtgtgtgtgagagagagagagagagagagagagagagagagagagagagagaaatatttgaagagcggaatgaatggagggacagagaaggcgggtagcactaggaacccaggaggcagactgctgtatgaccctccgaggtgacctgagttcgttggtcgccagaatcaaggtgagagagactaaggaacagcagcggaagcactgcttcaagtcaggcttcctgggagccggaggtgtgactcagtggtacagcggtagaccgcatgtgcaagtcagtcgcatcacggggcaccagttggtgacagacggaatccctcctatttagaccacctgccacacgtggtttaccataataagtatctctcctccctcagtgtggcttctggagaccagagccagcgaagttgttcctgcttgtgtgtggtctctacagtacggcacgcagtaagcaccccataaaactccccataaagcagttcgtgaatgagtgaatttggaccttcatgccatagtgagattccccaccggatccaaactgttaagacttggagcacttttcaaaaacgccttggcaccacggaagcgccgccctcaagcacttgttgaaccaaacagagcaaatccgcttccttcggttccgcccaggctgggaggtctggctttggcaaaagcgcggatcgcgctgctgtgcctttcttacgtaagagttaatgaaccctcccggccatctagatccctcccattacaagggcgcaagggaaagaaaatgagcgccgtatttacaaacacacggttttggtggtccattgcaaattcatgtctagccttggctccccacaaagagcttccaacaccgcggcaaagctcggtgtggggcgccgaggggcggtgcgctgtggatgtcagtggaggcggaaggatagcgtggattaggcctgcgcacccggcaccctctccaatgccccccagaccgccccagggccccggctgtgagggtgacagcggcccctgaaggtgactcgagctccaggaggtgtctgtgacgtcccccgcaggctcaggaacaggggaagccaggggctccttctccaggcccagcagcccggagcccgaacgcctttgcagagcgtcccttcccgtgtcccggctgccctgaggccggagacgctcgcctttgtaaagcgccccttcccggtctgcagcggccttacagcccgggcgcggcccccggagcggaagatggcgacgctgcccggctcccggcggccgcgaggggccgcggtgctgcgcgctnnnnnnnnnnnnnnnnnnnnnnnnnnnnnnnnnnnnnnnnnnnnnnnnnnnnnnnnnnnnnnnnnnnnnnnnnnnnnnnnnnnnnnnnnnnnnnnnnnnnnnnnnnnnnnnnnnnnnnnnnnnnnnnnnnnnnnnnnnnnnnnnnnnnnnnnnnnnnnnnnnnnnnnnnnnnnnnnnnnnnnnnnnnnnnnnnnnnnnnnnnnnnnnnnnnnnnnnnnnnnnnnnnnnnnnnnnnnnnnnnnnnnnnnnnnnnnnnnnnnnnnnnnnnnnnnnnnnnnnnnnnnnnnnnnnnnnnnnnnnnnnnnncggcggccgcgctcggggggcgcgcggctgctgctgcggcggcggcggcggcgcggcgcttgaaggggccgcgtcgggcggagcagcgcgccgccaacatgtcggatacgaaggtaaaagttgccgtccgggtccggcccatgaaccgaagaggtgagccgctctccccagctccttttgcatttctgctccggccgagggcggggggcaactttgcaaactgcagggcggccggggatcggggacaccggtgtggcccggcgtggccccgggtggaggcggcgcccaggctctggccgcggccactatgtgcccggggcgccgtctccctgcctgcccggactgagccacgcgcgccggctgcggccgcggatgctccactttgcaacatcaccctgcccctgtgctttcagagctggaactgaacaccaagtgcgtggtggagatggaagggaaccagacggtcctgcaccctcctccttccaacactaagcagggagaaaggtaaatcccatcccggcggctcctgccaagtttgagcccggaaaaaccgagtgcgctctcccattgttagcaagggtggcttcaagtttgtcccacgctcatgcggaaagcggttgcaagtgcagggtcccctcccctccttgtgcccatcacttcttgtcccctctcatccagagcgatgtctcccaggcagggaaccctggccagagtcagcactctggcttccaggctcctagaacgtgaagggaccggatggagatgtgtagcccaggccacatcttaacacctaggaaagacgttatctgaagcgtgcaaatgaccaatccaaggccttattgatggagttcagctccagcgattcttacgttgtttgccccttttcgcagaactgcttaggatgttgtatatgaaatgggggctgggagcctaagaaatcaaacacccaagtacaaggctagggtcatttaaaatctgtatgtaggttgttggaggtggtgagttgagatggtgtctgaaagtaattcgggaattttgattttcgaggaaacagacagagtgctgatacggagctgtttagacactgggatgggggaatgttaaaaggggctgcattttctagatggcaaggcatttgcatttgaaaagtcctgactgtgggatccttattaattctactgtgttccatgcaatggtatgggaaaacgccctaaaatagtgtgaatatttggcatttttatggtaagcccctgagaagaaattggttgggattcattcgttatggcattgtaggaccttataaaaatagaaaagaaaaccgggattccgattcggcttggaaatgagtacgagtttgaccctgaaagtcacctgttggttgatgagctccataatgagtggatttttgctctttaaagtttccctgaaacccaattgtgagtagggtttgttactttattgctaagcgaggcagctgcttccttctataatcataccccactgcagcccagccttgctaattttgggggtcagattgttatgagggataagaatggggaattctttcctttttgtattgagcccagagtgctccattgacttcgcaaacattctgcatttcctagcagatagtcactatagcagattcttatactaacttaatggctaagttatcttaaagatgtgtatagatctttacatacagtaatggatgtatccttggacagtatttttggacatgttaaaatattttacagtatatgtaggcatatggataatagtataaaaggtatattttatggtgggcattagtaaatttgttgaataaactaattaaataagtgcctatgccatatcactattttatttgtctttcaaagctggatcttgtcatattatttcagaagactatctctttggctctggttcgccaaggcagcctggggggaacaggtagactattttagcttctcctaggaagccaaggcttcagtttccccggcttggtgttgcttttcaacccccccccccccgccccgttcttttaatacttttaaccatatatgtgtttgttgtacatgagtgggtgtgtccattcattcatccattcatccactcattcattcattctgagctccagggtatggagcccagaccggtaggcagggtaggcatgtgctcccaaccaatggcatctgctctccttgtcactcttaaaccctagggaatgccactgttgcctgctgttgagtgaggtaaaaccttgccatttgtctataggaaaagctttagtttggtgggatttgaagagaattgataactctggctagtcggtggtaaacactaaaatatcacatggtcgttccttgggccgctgtgttagatccttttaagtgaggacccgtggaatgtgacctggacatttatccgttggcgtgctgactcgggtagacccctatccggagctggaagaataggactgaactgtggggtgctctctggttgtgggctgacagatggaactcttcttcgtgtgattgaccggccctctctgggtctggccgtgtattcactggccgttcggtttccagaccagagaggaatcaacacaagggtgctccgttcaggttaggacgaccgtctttgccagaaacgaagacaccaagtacattttgatgtccactctgtagcttggtttcgtatttcttcatggaacttccccttaaagcaacagtgcatttaaaaatagaaacaattcctcccttgggctgtggcttggtagtcacaactgtgctttatggtatatttgcaattcatgtgtgccgtccgtgtttttttggatagagcttggagcagggcaagggtgagtgtgtagaatatcgagaccgtagtgaaatcttctgggaattcttaggtctgaaaagtgagaggtccttaaataaatgctggcaacttgtcagattgagaagtagtgtttttctgaggttgcaaaagattgcccacgcattcagagatgctcagagttactgggtcaaagtcttcagtgttaccagtaagaacaaggtggagtaaatccatcgacttctaggaaaagaaacaggctttgcattcataccttcttttacgggacagcgttagtgaagactgaaagatcagacgacttctcagactaaagatgtttgtcttgatgctgaaatcccagcattagaacgctgcataggtccaggttcatagccgatccacgtttggtctgtcaatctacaatgctaagacccacatgatttgttccttgtaaaacacgtagcattgttcttgggcgcacacagaattcctgtcggtcccaggcttgaccaagggaaccgaagacaactgcaaatcggcagttatgccagaggccctcgccttggagagctgtgggaaggaagaggaaaaatattttcaacgctctgtggtaatcgcagaggtgtgtgcttggcctttgtgtacactgtatcatttgtaaatctcccacttctgtcttgctggagactgtgtactccctgaatgaagccaggtaccttgtgttgattccccttgtgcccgaggccccatacagcgcctggcgcataacagctgccatatgacgagaacacaaggagctatagctgccacccacggtgcaggtgcggaggcagctggctggcatcgggctgctcgtatataggctcactttgcaagggtgaggtcaaagtcctttattaagggaggtggaaacattgctgccacagatcacttccgggcagttctctgtggcggaatgtgcggtgaggagtgggacatgctgacgcagcagtttaccttgggcgcagattgaatgagaatcccgtctgccatatgtgtggggtgtgtcgtgctgtatgccatgcagagtcgtcttctcaaccctgctggcagcatccctcccctccctgttctctttccttcctgattttgtttcacttatttgcattttatgagacaaggtctcacgcagctcacactagccttgaacatgctaagtagtagcagctgtccatgaaccctcgaccctcttgcctttgtcttccaagtgctggattacaggcctgtctctctctctttacccatttatttatgactcctttttctgaaagtatatgaacataactgtacatacacagagaagcttatatcttgctttgatatcttttaatatcaatataggaagacacatttgtttctttacatttaccctggatgataagagcagtctttaaagatacaggtcctgccgggcagtggtggcgcacgcctttaatcccagcactctggaggcagaggcaggtggatttctgggttcgaggccagcctggtctacagagtgagttccaggacagccagggctgcacagagaaaccctgtctcgaaccccccccctccccccgcaaaaaaaaaaaaaaaaaaaaaaaaccaaacttacgttccttaggagatattgttataattttgtcagtaaattggaaattaagcatcatagtgaagtttgcatctattctcagccaagaaggtaaaggcctgggatcccagacctcggaaagtgggagacctttgagagcttgtggctagcctgatttatgtagtgtgattctgacaaaaaagaaaaaagaaaagaaagctggaaatggtagcacaggcctttggtctgagcacctaggaggcagaggcaggacagtctcttccagttcgaggccagcttaatgtacagagcaagttccaggacagccagggctgttacccagagggcccctgtcttgagaaacaacagcaacaacaacaacaaaggcaaactgagtaaaacataggccttagtaaggcgtcatcaaagttgttcattttctacctggtttttttctatactgcacacacagtggacgtggtgaacataggcagggaggtcaagtgggaactgcagtgtgtcttccagttcacatatcatatgatggatgtttccagagtggcttctccactcaagagatttttaagaattaccgacagtcatacaaagttagcaaggcagattccctaagagtcagcctcccacgttacaaaatcattttgaggacctgggttctggtcgcttttgtgctactgccttcctctctggctttattaccaaggtggttacatgagcgtaagataaatttcggtcttgctagcagcaggagggcgtattcttcttgcctgatagtggagtttgaaggagcacagcaatgggatagtctcatcagctgtcaacatttctaatttgttttaagttaaaggttcattgaaatctcattttcagaaagaagacaaaaagcagctatatggtatacgagatttatttgaggggggactgggtgtggtgattcgaaactgtgatcccagcacctaggaggccaaaggagaggatcaccttgcctttggggctgctgtggactagagtgtgttcccttgcctgcctggtctaacctgagactctgcctcgaaaataacctgaacagtggtgagggagaaacacttgcttagcatctgtgaagccacaagttgggttcgatccccacccggttttattgtgggtgagcccacactctagttcatttataaatggtggctgggactatctgagctcctcccacacagctccccagcgagccacaaacatctagtttggaaacaaaaccaaacccaggtttattaggattctaggtgctggtttttacgttttgacgtttacactgcttctcctggaccagtcccgcactctttgtttgttttgatttttgagatgttcttgctgtgttatccaggctggcttggaactcaccctggagcccagttggccttgaactcaggcccctcctgccttcagagagctgagggtaccactctgccttctgggaaattcttccacttgtcttccaaaacttaaggttcatttttcttcttttctgcaattacataatttctgagataacctgttttgggctattttgaaaaattgcaccttgattgtttgttgtggaatttctgtctgaggatgctaattacgtctgtctgtccgtttcccccccccccttccccggggcccccacctcttttccctgtgcatcattgtgcttctctggtgtctgtgggacaaggatgtgctttgcctctgtcctcagccctgagcttcttcattcccgccccccaatcccccaggaagcatttgtaagttttctctgctggtttgagtatctattatttaaagctttggctagcctccctttctacttacatcacaaccagaaaaatgggaataagagaaacacagggaaaggctagaactgaacatggtggtggctacagatggttgtcaatcactcctattcgagaaggtcattagctgtgtttaggacacaatgctagggaaggaaaccccttttaaatgtttttgttgttgttgttgttgttgttttgtttttgttttttttttgttttttgttttgtatcaccatggcaaaaatttcattaagaaattgcgaggtatatgcttactgggctgttaaaaaaaaaaatccctaagaaaatgagaatgatgccacctgggctgttgctgtgttgttccacaagaagttgttagcagcttctggcaaggtaagagataaatggaaaacatggaggattgctttcaactgtcaggaaagattatatgtgccatgtactcacatcttaaggaaaatttacagaaataagttaactcgaagagtaggaaccccagagacttcaaagtttctcagatttacagtgctgccttttccctggatcttcctgggagccagagcagagatgttgtttatgtgtttagaatttaaaactgtttccagaatagtctctgcgaaggaagcagaatagctgagaagtcgccaggacacacagaaacactcagatcacattaaaacctcaacagtgtgggagattaacctgaactgacagcagagatgccaataaggaaacggtgctgaagtttgtatgcgaacagttttcaacaacccagagttggtttagctaggagtggtggtacatgcctgtaatcccaagctctggggtttgagacaggaggattaggagtttaagaccatcctcccctacacggctgagaatacacaagaacctttccccccaaaattaatttaaaaataattttaaataaataaacaagtgggtttgacctatgaaatccatcaacagggttttaaaagaagggcacaatataaaacattttgggaaatttacgcttgaaaaacataaaaagaaattcctctttggaattggtttcaatggccatcaccacccagcaacaagatagcaagcagcacagccagaatcaggttttcttatctttccctaaaatttcatttggaaaacgttgcaggtttagtatttgtcgatttaagatgaagggacgtggggaggtccgtgtagacgcttgggactggtatttctcttgagtcttgagaatcactccctttacccttcttggaagttgtccgaactccttaatcctctgtcctctttggcctaacaccatcaattctaagttccaaatagacgccccacctaaaccgtcataatgttaatagttaactctttcttcagattcacagaacccggcaagatcgccaggcctgaaacaagcccaattcctttgagaaagcctaagtctccccaatactgccctctgagtaacggtcaaccccggctgatgcaggctaaagagcctgagaggtctctggtccaatcactcgcattaaccacttttgtgtagttgctatgaacagaatacctggcagggacaacctcggtcagaaaatgtttatgttgtgtaacggttcctgaaggtctcagtctgcgtgtggcgaggaaggcttggctgagttcctgagggcaggaatgtgtgctaagagaggaaggcagtaggggctgggctctgatttcaaaggccaccccctagccacttttttgcagtagtcaagtactatttcctaaatccccacaagtaaagtgcagtgtgtagtcttcttgccttgcttctcctctctctccccacataagcccttcctgtctgtcccatcaaacccccaagatggacggagcccccttcttctcaagagcactagctcttcaataaacctgactcctccttaccagctctcctctctcgagcactggcctttccatgcccgacttactccaatagcatcaaggttcaggaatccgagactgctgtcccagacccttcgtttgactgaaaccagggatgatatcatgttaccctgagactggttgttcaaagtcattgacaaagtggaaatacttcccaaactatcctcaccgaggtgtctcggattaaagcaaactcgtgtatccccacagaatcgccccagcactcaactatcttttgctttataagaagcttaatagaagaaatggaaagtaacagttgtaacagaccagcctttcagccattacttttgcttgtgtaatgtgaatattttcgttacaggcttatgataagctcttctttcatttgtgctttgccatgctacatagctctcgccgttttaaatttaatattacatagtctgttgagtttcactctttttatccatttctgtattttcagagctcactgctggctctcttaatgatcacatacataatggtgtcttcttagagtcgttagcataactgaaaggcccaggggctggggaggtggcttgggttgagtaattagtgctcatgccaaggacctgggtttgggttccagcatgacagcccagagctgccggttaccccagctctggtagatctgatgtgctcttctggtctccttgatcccgttcactcatgtggaatgcacacacacacacacacacacacacacagacacacacagacacacacagagacacacacacacagacacacagagagacacacacacacacacagagacacacacacacacagacacacacagacacacacacacacagacacacacagacacacacacacagagacacacacacacacacacagacacacatagagacacacacacacacacagacacacacacacgcccacaatgataaaagaattggaagggatttcctcctagcttgctaacatagataccatcttagacacagtataccgcacgctgttctctttcatgatcacaaagtcaaaagttgatgctctttggagctaccgatgagggaggacatcgaaaaaggcaacccaaaagccagtttctgccaaatctcctttctgtctaacctgagaacttgaacggacattaagtcactgaagtgctctgaaccagtccacatagagatgtgcacctctgaccggctcccaggagactctgatgtaaggcagtcagcgcaggagcctggaggcaggaactgatgcagaagccacagagggatgctgcttactgattggcttgctctccatggcctgctcagcctgttcttgtagaacacagataggtccaccagcccaggggtagcctgcctacaatgcactgagacctcccatattaatcatcagccagtcagtcaatcaatcaataattaagaagtgccctacgggcttgcctacagcttgatctaatggaaacttttttctcagttgacttccttcctctcagatgactctaactaacgtgtgtcaagcaggcaagaaactaagcagcacagtggaaaagagtgtagcttggacactttaccttgaaaaaggcttcccaggcatttcagtgactactggttttttttttttttaatttttttctttttttttttttttaaagattcatttatttattatatgtaagtacactgtagctgtcttcagacactccagaagagggcgtcagatctcgttacagatggttgtgagccaccatgtggttgctgggatttgaactccgaaccttcggaagagcagtcgggtgctcttacccactgagccatctcaccagccccagtgactactgtttaacacacctcttgccagcaggttgaaacagccatgttgctacatccatagattctgtaggtcaagaatttggaagggcagagtggggattgtcttactcggtgttcgtgtctggggagtagccatgccaaggttcagctagttgaatgtccaggagcattaatagcatcagcaactatcttaaatcaaaattgcctaattagattgcacttctcttaactcataaacttgacactggtttcccatgtaaagccgctgctgcagattgttagctcagtttaacaagccaagcttgaagcccggttttataacccaagggctctccagcccggtgtgtctgattgaaaccctcagtgtctgtctttcctggagttggggagaagaagggagaaggagtcagggagtctcctaggtgttgtgaacttgctggatgctggcttgtaaagagacacagttttcttttccaggctcagactcatgggccccagtgccctgcttcacgtcttctctggtgttcccaggatggggcagccagtggtcaaatggcactgtggtgaagtgagaattctgagtgctgcccagtactgctgctcctgtgaccaacgggccactttgagcttagccaccagtgggccacttttgcctctaagttcctttgttggcacaactgtagtcaggattagatcatctataaggtcatttttgctcttgttttccaagttctaacattcaggtttacccacatacagtccctaaatacagaactgagtcaaagtaggcagcagatgaaccagctaaaatgggctgccttttaattctcgtcttgtcagtgtcaggagtcttggggaggccagggaggccattggtgggaggctccgctgatctgcagtagctgactggaggtttgaaggtgtcaagtgaaataagacagccaccagctccagacactgaggctcttatcaaccagcctgctggggcctggggtgcttacagagactctgtctcctgcagctagaaaggtgtcttttctgtgtgcctacaggacattatgaaaactatttgatttgaatcttctaataagatgccatcttttgtgcgcgcgcgcgcgcgctgtgtgtgtgtgtgtgtgtgtgtgtgtgtgtgtgtgatgtgcagctgttttgggcaataaggcatgaaacaatatatagagtggactaaataactttctcacagctgttagcataaaatctaacttgctctgaagcccctccccctcaaggtcttattgtgtagccctggctagtctgaaacttactctgtctatctagatacacacacagacacacacacacacacacacacacacacacacacacacacacacaccacgctgggcttgaactcacagagatctctctgcttctgcctcctaagtgctaggattaaaagttcagaccaccatacccagctctctttttcccttttctttctttgttttcttccttccttctttctttccttccttcctttctttcttccttcttcctttttgtgaaaagaagaataagttgtttctgtttgttgttaatgatatgtatatgtgtggtggtccatgcaggtacctgaggatgcctgaagagagcaccatatgccctggatctggagtgatgggtggttgtgagcctgtggacatggtgctgataatgaaactcagatcctctaagagcaatccatgccttctactaaccccagcctgtgttgtttctgagggttttgttgtagccctaccattctgtagctaatccctcatatttctacactgatctcagccaaaaatcccgagggatccccactactctttactgccttctgttatgggatgaactcagggtgtatgtgtgtgtgggcgcctctactctggtttatatactttttggacagtgtctttcatagcctgggctagttttgagctctctctatgtagccaaggctggcttgaactgcagaacctattgccttcacttcttgagagttggaattacaggccttggtccttttgcttccttaagcagggtggaggttttggctccttgtggcctgtctgagtctggcctttaggtgtgatgagctttgctgctgtcaggctcaagaaaggcatctgtttgctattctcttgcttttttttaaagacatggaatgggtagggagctttgggggaaagagaagcttcactctttgcagttggctctgtgtgtgtgtgtgtgtgtgtgtgtgtgtgtgtgtgtgtgtgtgctgactctcacagacactccctagctctacacccattaccagtgaccacagacattcacatcccacaagctggaagactcagaggagaagcagggcgggtgaggagctatgtaggcattctgctttgaatacttgtatgcacagatttatcctgggtgctgggtgtagccacagagcttcgtgcagtgtgttgcaaaaagtaaaaaggcctttcaaaatacttacattctaatgtgtagtttaataaaatggtccaaaaccgattgctcttcctacccacctatctcactagctcagctagatggagagtgttgaaggatttgtagccgagggcgcagagatagctcagcagttaagagcgattgtcagtcgctctgagtttgtttcctggcacctgtgttgggcagctcacagtcacctatcagtcctgttccacgagatctgaggttttcttctggccctctggggcaactacagatacatggcatatgctcacacagacatacatgcatacacataaatgaaaactgaaaacatgaggggccagagtggcttcagatcttccagatgatctaagtttgcttttccaagaccaacttcaggcagctcacagctccagtggagtgtgatacatatgacttccttgggtgtgtagacacatgcacatactcttacacagacttgcacatacacttaattaaaataatagaagtattttaaaataaaattaaaaatgtttagattagaacacacatacacatagacatacatacacacacacacacacacacacttcttgcagaaggccggagttccatttctagcattcacatcggatgggtcacaactgcctgtaaccggagttctaggtgatctgacggccaaaggcacctgtacccacatgcacataaaggctcgggtacacagcagcatgtatacagaaattaaaggacacgacatctcaagatttgtagctgaagttgtgctgagaggtttttggtagggctttggtattggcttgtcttttcgttctctgctcttagctgctctgtgtagttaactgaagtgcaggactcaggtacaaattggaatgggaaggaagaatgttaagatggaggaaggtcccgaggactcaactctggaggccattgctttccaaaggcaggggagagtggaagtagggagcgtgtatcaaaataatggtgttcaattaagcggcatggagccctggtaaaggtctgaagttttaatacagagttacaaaaagagcaaataggaaactttagcgtggtaacacctgttagaaaagttgcaaggagccttgaagtgttgctggctgtgatggtcagcttagttagtatttaccagtcttcatttttgtaatgagttacaaagcggagatgaattttccagaactgctggtctactgttatcctaaacagtacttttccttccagttattttctcccctaagacagtcagctatcctaggtttacctaagaattaaaacaaatcaaaacaaaaaaaaaaacaaccccaaactactagaaataaaacataaagagttttctaacttatcttacattgttccgaacaagcagcattaaaaaaaaatagccacttgtcctgactcctccctaactaaggggcagcttggtaccaggggaaggggattacattggccattttacttttattgaattttaaaattcataatttttttaagacatggtgtctacatagtcttgtttgtcctggaactcagtaaataggccaggctggccttaacctcagagatcatctgcctctgtctcccaagtgctaggattaaagatgtgtgtcactatgcccacttcctttgattgaaaattgtgacacattcattttctactctcctggaggctgaagggaccattactctaggtcagcctggacggtggtctgcagtcggattcccctgatgtctctgaagtttactgtatcgactagaagaatattgagttccttggattctctgggtcctctggccactccagagcacagatgactataggattttactggcttaaaacattggccaataggatgtggtagtggctgtggtcccagctactcaggaggccgagacaggaggattgctggagcctagaagttggaggccagcctaggttaaaaaacaaacaaaacaacaacaacaacaacaacaagacaattgaccacggagttgcctttatattatgatctatgttgaattttattttacagttctacatttccttatttattgtttgtgtgtttgtgtccatgcacatagaggacaatatgagggacccagttctcgctttctatttgagggactgaaccatggtcatcagccctggtagttcctctccacactgagccgtatccgcagcccagcactggattttctacacagcaagctgtctttctctgtgtaatttgacatactgagcaaatccgtcatttgcaaagttaccttgagcagaattttttaaaaaaatttaaattattgtaagctaccctggacaggttgagcctcccttgttgaaaatgcttgggactagtatttcagcccttgactttgtcaagctgcagagtatttatgcacacgtgacaaggcatcatgggaggaaggccctgctctaaacactaaatccatttgtttcatctgcactttatacacgtagcctgcaggtaacgatgcaatattttcagtgaacatgtgagctgcccatgacttgtctcatgtggaatttcctatgtgggacatagccactcttaagaagttttatgatttggaatctgtggggttttagattttcagattagagttactgaatctacatccgaaccacagcgtttaccccataaggagaaactgcttgcttgtcttttgcagtgttgatgaagagattgggatgtaagtggccagctttatgctatgcatgcctcaggcacgtgtgtgtgtgtgtgtgtgtgtgtgtgtgtgtgacacacacagttgcatgtcagcttagaccctggagccatgtgtaagcctctgtcatggtgtggcaagagtgtcaagtagagatgtgacccttgacaaccacatggcagttataaaaaatcgccataatagagtaagcgtctttacatttctaactgatttggatcagattcgcagtcctccttaccatacgcagctctcccgtccaggagtgtggacttgggagacaagccgcttctctgggtctgagtctactacactctagctggaaaatcgggaccaaaccttaccttgactcgcagtgcctctgtttccagactgtatgactggtgtttgaggcccccaagagttgacagttttttacgtccctgggacacatgaggatgcctgaccccgtttgcttctcctgtggtttcttattcatttcaggtttaagcaaagaagttcctctctagtacctaaaaatagcaattagaaaaaaaaaaaagtcttagggaagtggagtgtggtcctagcactggggaaactaaggcaggggaattgctgccagttcagggccagcttaggcttgacagtgaaagtaaatgaataaagagtctcatggttttatctgtaagtgttttctgatgacctttcattaaatgaggcatgccctttttaaaaaaatgacttgttctttttaattgtgtgtactggaatctgctgactgggtgctggcacctgtggcggctagagacgctggatccctctggagctggacttccaggtgattgttagctgccagatgtggcttagccactggccttctctccagctcacattttaatgacttcccgcctgatctccaatcaggcacatcccacttctcagtcgataagataccaccgtgcctatggctctctcgaatgggcacagtgcgctttgtgcagagggaactccttattcatgggtgttccctgtctcttgggctgtcggcagtcattcatttagtgaagagtttgtatctggaatccacatcactggtgggaagaaccgttctgtgtgtgcacgggcacataaaagaatgaagccggggtgggggcgctgcaccaaaggtggtacactgcagcatgtctgctttgcagagtgctggacacatgcatgcggtggcctcccctccccctctgccacgtgcaccatcttgtctgcattcaagctccgtggttttgtcaacgaggagcccaggtgtgctggatggtatttttgcttgtttgtttttgttttgtttttgttaacttgacacaagctaggatcatctgggaagagggaacctcagctgagaaaatacctccattagacaggcggaaggcaagactgtggggcaatcttcttgactaatgatagacgtgggagggccaagtccactgaggaaggtgccacccttgggcaagtggtcctgggaggtttaagaaagcaggctaagggctggagagatggcttagtggttaagagcactggctgctcttccagaggtcctgagttcagttcacagcaaccacatggtggcttacaatcatctgtaatgggatctgatgccctcttctggggtgtctgaagacagatgcagtgtactcatataaataaaataaataaatcttttttttttaagagagagaaagaaagcaagaaagcaggctgatcgagccatgaggagcaagccaataggctgtgttcctccatggcctctgcatcagctcctgcctccaggttcttgctctgacctcccttcacgaaggactgtcagctgtaaacagaagtaaacccttccctctccaagccgcttctgttcatgggtttatctcagcaacagaaacctaagggatagaacagatgtctcgctcttccgtgtgcccctcccttctctcactgagctgttgctcctccgtctcaccttggaagcaaagaaagaagaagatggggaaccaggatacagggtagaggcaggacatggaaggaagattaattcaggctgagaggtctgggccttgatgaggttgactttccagaccggtctcaaagctgccatcagagactgggctctgggcagtgagggcaggcttgtgcctggtcctgccactgaacagagtaaggtggctgcagtatgccttaggtgaccttgggtttcaaatcagaaagagaaagccttaaattagcagccaatcaaagctggtcagaatctggtccaggcatgattcatgtgggggactcgtggctgtgttcgcatggccggattctgagaggagagcctatggcggtatggaggtaaatgagcttgtatgcctcccacagtttgtcagctttgacgactggctgtcaaaacaaaattaatcaaactgtaatcattgatttacccagtgggatcgttggcagcggtgaccagggaggttatcgacgggaacctctccccttgagtcccttatttgctgaattttttatactcaggtcagcagtagagtcacatgggaatagtgagtagagttttagtgccactaaaaacctatgcacccatttatttgaatatcgctccatccctcagccaagccctgttacttgagagttaaagacagtaacccattctttaagagaagagtcccctcctagaactgctggcagagagagtctcttctgctttccgtttcctccatcatatgccctttctagatgctttgtgatggagtacagtaagccctgccgatgctgtgcctgggaccacaggtctgcggtggggcggtcctcagactgtcactgcggttcttcatcttagtgtgggcctcctgaagcctctaatttctgcattagattattacataataatggactccgtgctgtcgtgtggcttttgggatcatagcaatgtggaaggctggttactgtgcctccctgagctctcggcagtactggggggttggatccagggccgtgtgtgtgcatgtttggcacgctctcccgcaccgagctagccggaacatggcagtacaaacgtagctctagagcctaatcccactgacaatcactgctttgggccgacaggcagaggctgccactgcttagcactccatgacataagtgatggttattcagccaaaaggtcacgcagtgtttggcaggagttcacattgtaaaggtttactgactgcacggtctgcatggcagctttcgcttgaggtttatccaggaacttatgggagagaattaagctctaggcaaagtcatgaaaccaggaattcatgtccaggaatgcccctgagtctgtgtcgccttctgacctccgggtggtatgtgatctcagtcttggtgaggcaggggctacaccgctctgccttgggcattcttctgagcctcccttgtcatgggaagagagggacaacactgagagtgaggaaagagagacactggccagttgtcagcatcacctgcagttgttgcctgtgaataccatggccgtcttcctcctgggggctgagggcatttctgggcacccaaccttacagttcccaagaggcagttgaatttctgctgcctattgtagttggaaagcaagcttgtgaaatctccatgttcctgtctggaacatggggaccagtgacgctcctgaacttgtcactcccctgggcattctcagcattgaggaaaattctcaacatgtgctccaagagtgtacactggcatggaagtccccggagagtggcatgctgcagggataacttaaaatttgttcacatttatgtttgtaagaaaggccttggtagactttgtcaagtctctgtctattctttacagagttggtcatgtaaagctttacgttttatttaacaagccccttgacggtgagttgctggtgatacctggtgcagtggttgtcaaactgagcataatcccatggctggaagtcacagcaggagggcagaccactgtggctggccagttgagagatggaaaccacactgagcactctgggaagtaaaagttgctgggaaatagtggtcggcagcagcctggatgctggtgtagccttggagactaagcagatgtcttcttggttcctggactccacaggatctttgttacaatgtttttccattgtttctctctgacttagacaaatttggtttcccattctttctgggtgattgagttgggttctctctgtcttctctaattctgagcacttttcatatgactcagccgtagatgaaataaatggctctagttctggccttgttgtttgtagggttgggggtcaaacagtggcttcatgcttgctactacattatcatctctaaactatgactccaatcttttgttgttgttatgcttaatcctaacgatgctgcctgagccttttcaggtagtcatagctaacatctgcctgtgcaggggaaataaatgacccctagcccctcctttcttcctccctccttccttccttcttttctttctttctttcctccagcaacttctttgctcttagtgtcatttattctcattataaacacagcagctatttgaaaacttacaaaatgtaggttagagataaatatggtttgctcatcagactgtcaaccgtctaatgcatttcatggttggtgtgcagtaatttataccactgggatacataactccttaaagctctggaagtggttgctatgtgtaccgccgctaggcaccctgtgctggaggtttagtctgagcacagttccaccttgttgacgttttctctccctcttgtgttagtatctcctgtctgcaaactttccccttcaggctacctcgcttctgagaaggcatctgtactgcaagggagcccagcatctgcagagccaggctggatcctgagttttctgttcttctttagtgttaggaacactagccaggtgaccttgccgaagctgggtgaccttgggtgagctgcttccactccatgtgctgtcacccgcaacttcaagtgagctcgataacgctctcagtggcagctgctttagtgaccaattctgcatgtgagtcggagccgtacgacagggggattacacaagtagtggaacaaagattccttgaaattacctctcacagtgatcaaggtaggagggtgcagtcaggtgactgtgctggtccgtgtgaaacccccaggcatgtcacgtgtttagagtagctgtcacagatgctctgcttattagtcaccctctcctttatttatttttaattttttttggtgtatacacagatcgtccttcttagccctcaagactctgtcttgtcctttctttcttccctttcctcctcttctcttctcttccttcctctttctctctccccttcttcttcatctcctcttcatttttgaggcagggtctcatacagcccgggctggccttgaactcacttacagccaagacattggttattaaacatgaaactcctgatcctctcaagtgccagagttcaggtgttcctttccgtacccagcttgagtgtcttcttgcttgtgttcctttagctagtcctcagaacttttggatttgccaaaacatgccacaatcactgccaaaaacatgttccacaatcctgaatacttactgtttcaaaaaataaaatatgcttttaatggggggaaaaaaccaaaataagaaacaaactccaaatgggcataccagggtgtttctcgtgtatactcaggctgtagtgtggggtcaccttagaggaaatgaaataaattacacataatttccatgagctaccattgatggttttcattttagcttcacctctgtttttccacctatgtaggtacaaaattttaaccctgtaccaaactagcacttaaagaaaattacattcatctacgtgtgtgtgtgtgtgtgtgtgtgtgtgtgtgtgttggaagatgcttgcataccatggcatacctgtggaggtcagaggaccgcctgcatcccagggattgaacatagatgccaggcttggcaacagatatcttaacctgccacttctctgggctcagattggtacctttgaatttgttgagtttgtgttattacatcaatttaaagttagtgctaaaatgaatgtatctgttactataacggtgagtctgaaataaatgaacagggcaaaccaaactcagtgccgggccagtcaagggagtcggcatcgcaggcatcttgggttgccctggaaacgcccgctaacgcgcactcggatagctttgttttgagtcacttgtaatattttccccctttcctgctgctaaaaagagaatggaacttttgactcagggaaagctatgtgagatttttgtaaagaccaggaaccagaagtctgggttctctgaataactgccgaggtgctggctacagaaatggcctgtcagagatgtgacaagggacaagagctctgttctacccacattctttttgtatttgaatgctgttcttggatagtcaggtttcagagggtttgtgtgcttggccttggtggacacatttctttctcctctccctctccctgtgttcttcctttctttttcaatactagggattgatcatagcgctggtggatgctacagagacatccccttgtgagtcctccctattgattgatttttaaccttagagagtctcactgaaattgcccatgctcttcttgaactcaaaactctccttccctggcctcccaagggtggggtggtcacagtgcaccacccagattgatggcagtgacatttctttatcaccaagttatatttgtctaaacaggtaaagattgggcatgacttagatagatcccacacagcatgaagaagtgctaagaggcagttcacggaggatcccaggaagcctttcgttgatggcacacgagcttcagtggatatctctgtactttcctagaaagtgctttctaaaatacacttccatgggattaactagagccagatctggagctgtgcagatggcagtgtcccttacgtaccaacgtgcatgcaaaatctgcctagagtgtcatctgcctgcttctatttacttcccaacagttcctgaaaatgcttcttcccctttgagaaagcagcatggctagatctctgtggaaccccaacacacacagattttatttcttatagcaacagacgcttccatagtttttatacatttattttcctgttattttaccccaatggctcactaagtaatttatcagtatcaccaccatcaccaccaccaaccaccaccaccatcaccaccctaaagtataaggtaaaaggagccataccttcagctgatgatgtcaactttttaaagatttatttatttatttatttatttatttatttatttatttatttatatgagtacactgtagctgtattcagacacaccagaagagggcattggatcccatcacagatggttgtgagccaccttgtggttgctgggaattgaactcaggacctctggaagagcagtcagtgctcttaaccgctgagccatctctccagccccctgctgtcaacttttaagagccacagctaagatttattaggctaccttttcaggtcagcaaatgatcacagcttgtgaaaactagaaaagtagacttacctgaacaacattggcatttatttttaaagttttatgttctataagaattaatggggcagctacaatgtaggcagtttaaactgaatgaaaggagttaatgaagctgacttgccccaacctgaataattaggtcctggataatagactttcaacccaactttattaaggtataatttacctaagctaaaatgcacccattcaagggtggccttcttgagtttttacagttgagtgcaccctgtagccatggccagccagcatcagggtattgaatgccaccatcacccaggtggtttctgggacctgagtcattggtgaagtgtcatgtgaaaaatacagctctcctcttgtcgtctcatgtgcttgagcatgctcacttcatgccttgtgccccttcgctctctcttcctgccttctctcttgtggtgctagggatcgaatccagcagcttgcacatcccaagatgcacttctccactgagctacatcctcagcctcacatccttggcctcaaactgctttttctctatttcccttttctccccttcctcttccccttccctcccccacacttcctttttttggggggtttggggggcagactctcatgtatcccaagctggcttcgaactcactatgtatctggccttaaactcactgtgtacatccagctggcctagaactcactttgtatcccaagctgaccttgaactcctgaccttcctgcctctacttcccaagtgcgagattccaaatgtacactatgacacaaagtttcttcccttttgtctgggtctcagcttgtcatgggaagcacgctctgtattatctagacttccaggctgtgtaatacaactctgggacgaagatcatgtgtgtgtgccttgagcagggtaggaggtaaagggatgggggatctgcagtctgaataatcatctgcacccacataagaagctttggggcagacagatagcgtaagcctcattcatcaatcacattgtcattcataagacaaaaccaacggcaggaaccaaacgtgagtcctgcagttgtgaggccagttgaatggacagctgtcgggttgcctgggtttttcttctaacttattgaagcccagaggaaagggaatttattaggcagaatggaagccatctcatggttcggtgaagtgctaatgcagacagaggcgcgcccaccaccactttcctggtgtggttgcccccagggctgggttggtgtccacgtggtatggagggtccggccacgcccatccgcagaagcagtccattcctcctcatcctgctggctcaccacatcagggaggctcacggtttccccctctcacctgactccgtttctctctctggactctcactgcttctcctaatgtctcctaagcatttctaggaaaaccatgactattcgaaacctgctttcgagtgtattgccatattgtcagctcctatgagagaaggaggaacttgccagtgggcggttgaacttccttaattgtttggtaggcattgtttccacccagttacagggcagggaaaaaaatgccaactgaatctaaaccaaaatgcttaggaccggaagtgtctcaaagtttggattttttttttttcaaatctttagatgtttgcttgtgtgcaaaaggagataggaatggaagccaggtctgaatatgacacatttatgttcacatataccacacaaaccctaaaggcagttttcctagaagatagagtctcactgtgtagccctggcagggttggaactctgtgtagaccagactgacctaagactcacgaaggtgcctctaccccaatgctgggatcaaaggcatgtgcccccatacctgggcttacactatttttagtcttttggcagccctagcgattgagtccagcacttcatctttgtgaggcaactgccctcctcctgagctccagctccagccgtgcgcctgcattatgactgtgacccatgcggccaggtgcttgaagctggagatacagcccaattgtagaatagatgcttcacagccacaactcctggagttttgatccctagtgggaaaaaaaaagttacgaatttttggagtagctcagattttagattacggatgctcagccagtacactgaatttatctttggtgatgatgacagtgaggatcccccagcttctaccataccatgttccattactccactgttctcgggcagatgcacagttctgtgtttcttacactccttggactgtctgagagtgatgaatggaaatgtttcccagggcagggtgtagctcagtggtagagcacctgcccaggacatgcaaggccttggtttaatccctactattccaaagcagtaattttaagttttatttatttttattttatggatgtgagtgttttgctttcatgttttgctctgtaccagcgtgcttggtatggggtggaggccagaaatttgtctggatcctctagaactagagttatagatagttgtaagccaatgtgtggatattaggaaccaaacctgggtcctctgagagagcagtaaagtgctcttaactactgagtcatctctccatccctgctgagagatggtaatctaacatatccactggggaaagaggaggggtttccctacaccccacctcaactataactgatggtccttcagctaataccatcaaaggttatttctctaaaatggccatttatttgttggctaacctggtcccatttgtagaaagaagaaaagctacttgttaaggggtgggttttgcttagcaagtgtcttgcggttttactgctgtgaacagacaccataacaaaggcaagtcttataaagggtaacatttaggtggggctggcttacaggttcagagattcagtccattatcatcaaggcaggaacatggcagcatccaggcaggcgtggtgtaggcagaggtgagagttctacatcttcatctgaaggctgctaatggaaaattgacctccaggcaaccaagatgagggtctcaagcccacacccacagtgacacacctactcccaacagggccacacctcctaatagtgccaagactatacaaaccatcacaacaagtcatgttgatatgtcattttttattgagttgagctctgtctgcagacatagggagccacaggtgggttcatcagtgtcccccaaacctgaaattatttttcatggttccccactcaagaatgctctattggttgagcactgccttttcctcaagatgctaccagttggcaactctcaccccctgaaggctgaagagccacaaatgccacataaaactaatatgtgatatggccgtccctcccgtcagactttcttgaagaacgtgttggatagtggaagcagaggcttttatccaatggggacacagattgcctctgaccttcacactgagtctcctgttaaggtggggtttagtaaatgcagttaaaagtgaccttcctcactgaatgatgagccctctttgcttaaacagaccttgctgaggaaggcttgtttggcgttgtttactctgcctgcccgtttccagccagtttatttttctaagaacacattctttcctctcctcccttccaacccttgactctcaggcaggcgcttatacagagaaacatctggtattctgagaattttattttcggtggctagttggatagttcagaaaacattttgtgtggtatctcccttattttcttatttatgtacatggattctctctctctctctctctctctctctctctctctctctctctctctctctctttctctctgtgtgtgtgtgtgtgtgtgtatgtgtgtgtgtgtgtgtgtgtgctcaagcgagtgagtgcaatgcccatggataccagcagagggcagagctggattcacagggaatgggagtactggaaactaactcaggtcctctgaaagagtggcaagcccttgacctcagagtcgtctctagttccttgctttgtgtgccatccttgtgcagggaccatgctaatctctgtatcattccaattttagtgtatgtgctgccaaagagagcgttctagctcctttatttcttttgtattgtgagtgacctgtataaagcgctggtaaaccctgaccacagacagtaaattaattaaccatcaatcaattgattgatttagatttttcaagtcagggtttctccttgtaggcctggcctttctaaaactcgctctatagaccaggcttccctcaaacttatagagatccacctccttctgccttctgaatgctggcatcaaagtggtgcaccaccttcacccggctatttttttatattttttaaaaacagggtatgatgaaggctaagctggctttcagcttgccggttagctgagggtgacctgcagttcctgagagccacattctgggattgcaggtatatgctactgtacaagggtgtgtttttaaaaatgtagacatcagtgatacaacaatgttagaattgtttatatagttatagttggatctttaaaattaatattgaatatattgacatacatcagtggtaggttaaaaacagtttactgtttgggggaataaaaaaatcttttgacaataatgagctggaacaaatgaaattaaaatatgagaataaactgcacaagaggaattaattgggaccatcacagtctatattgaaggtaaagctgaaggaatgggattaaaatctctgattttaaatatgagtggttgacttaaaaaaaaagtattattagactacccaaatgcagctcttgccttccaaaaatcaaataacagctgtgctgtatttatagaaaatattttactatttttagcttgtgagctaatgttataaacaacaaccatgtatttgaatatttataggtgccaggcagtggtggcgcacgcctttaatcccagcacttgggaggcagaggcaggtggatttctgagttcgaggccagcctggtctacagagtgagttccaggatagccagggctacacacagaaacctgtctggaaaaaaaaaaaaaaaacaacaccccccctccccaaatatatatacatatacgtgtgtgtgtgtgtgtgtgtgtgtgtgtgtgtgtgttttatttaacaatttcagatattcaaagctctcataatatctaggttttaaagaggtagttgcgtgtagtcagaagcatgcttcctgggactgtacaaatatagatatccttggtgttttttagggattgtatgcacatacttgcagtggccagaagaggacatcagttcttcctggaacaggaatcacagtgtgagccgcccattgtggtgctagttactgaaccccagtcctctgcaagagcagtcagtatacatgcttaactgctgagccatctctccccaaatgtagacattccgaaaggctttggatcaagcccgtctgctgaaaaaatgcaagagcagagggataaaaaaaaatcagagatgctttaggaaacaagccagctctttagggagttggaggactttgggtggctcgctgttcttgctgggatctgatgaagtgactgtcacctgaaacaagtgtcagtggatgaacgtggttgactctcactcgggtgaagttgaagtgtaactacagaagctgcgggcttggcaaagggcggtgtccgtgtcaggaaccatattctgtgtccttattgggttactggccagaaggtacttcagtagcagggtttggtgacagcctttagagatattccacctttggaaatgtcttctgcaaatgttttctagaggaaggcggggcagtgacctcaggctgtgcttttgagaccattgggatgttgaacttctcagcagcattggagagaacgggatggggtgggagtgggggccgaagtcactagacctggctgttgtgttcactgttaacacacctcctagatgcacctgttgtaataaatactgctttccctgtattatagagggataacttgccttattagcatgctaaggtttttgcatattggaactacactacagatttcttatttccatcttggctgttcatccgaggctaaggacaagtagaagatgggtaaggctctctaaagtcggcttgctctgctgacaccacagtgtgaagaagcttaacccagtgtgcttagggtctggaaaatacgaagatcaaataagcccacccatgaggacagtaagctctgtcagtgtcgttatcacacaatctaaaagacagtggctgatgagatcattaaatttgccaggatttagcatcagtgaggaaacatgaatgcccagcactcaggaagctgatccaggaggattctgtgagttcaaggccacctggctactgggtgagacaatgctgcaaccatctacaccgctgcaaacaaacagatccagacttctgttagcccaacagccaagtggagatgaccgcacctctcagtgcacggaaaggagacaacattctaaccaggatggattctttatgcattacatataattcagcaaatgcgtgttgcatgtattcaaggaaaacacttgttcaagtatatttgtggaaattaaaaggaaagtttcacttgtgtgtgtaatatgccagattgtactgtatactatgttcaatgtccagatgcatgccggacaagggtagaaggacccatggcaaacttggccttttctgtgacttggatgaatgctttgaaagcaaaagcaagcagactacctggagaataccatgaacaggagatttttaaagtttgaataacagcaggtaacaaccctagtgcttgttctagtcctggcttggccttgattgagagatctacagtgagcagcctttccctgtgagggaactagtcctagttggtaaactgaggctattggagtctgcttcccatccttacataaagaagtggatgtttggcagtatgtgataggagtaatgctctttggtatttagtgacttatttccaaatttagttcttccaaaaactattcctttttatttttaattacatacatgtgagcgtgggtgtccacagaggccggagttagattccctagggctggagttcctgccctgtgtgggtgctgggaactgaacttgggtctcctgaaaagcaggcaaacctgtagcagctgagcatcttccagccccaaggatgagccgtttaaaagtttcagaagtcaaatgttctctcactgggtttttcaggatattcctaagtatctttatgtattttgatgttacatgtgttttattggttttttttcttttcgttttttttttctttttacttgttggtactatgaaaaatgtatttgaacagaaggtagagatgggacaagtgccatgaattcaaggtcagtgtgggctaccaagtgagaccttgtctcaaagacacaaaaagaaaaaatgcctatttgagaactgctaggtaaatgaatccccaggatcaagagagacactgcattgtgattattcaggctcccaactgtggataaaccatttcttaagattccatgagggtggagctagagagatagatagtcaacagttgagagcatttggcagctcttccagaggacctaaggtcagctagcccgtgcatgacgtggcttatacttaaccacccttaactccaactctgggcaatcttaacaccctctctggcctctgcagacacctgtacataggtacacacacacacacacacacacacacacacacacatgcagtaaataaataaaagcataaataatacatgcagtaaataaataaaacccatacacacatgcacacacacacacatgcagtaaataaatgaaagcataaaattctgtgggcactcctagcaggtaacatataggaaaggaatgtatacagcgtttgctgtctgcctctgctggagtggcggaaagtagattcgaccactgagagccctaatcatggcgctttatttggtaagccgttagcaagtcagtttatcagagggcgtgcattcacgcgttctatttttaatcttctgtctctctctaaccaaacacaaaagtttgcctttagattcgttcaaatccccctctcacgtgtaggaactgaatcagcttgctttaggcttttcttgtacttaaagtgaggaagcgaagattttcaattttatgtttgctgagctcaagagagaagagcccacagtctactctgggagcctctgccagatgtgatttacatttgaaaaaggattaccaagggagggagaagagggaaaaagtacagtggctacagactccgtcctccctgcaggctgagatgtcctccctgtagacggtatccccgggaactatttgggtcactcctctttcattttcaatagatgcttaagttatgaatggccagtaaattggttgtaattaataattgttttagttcaagacttggttgaagaggaaagccaaccttagtaaatgcgggaaggcatgttgcaggacatgtgtcatgattagtagactatagaagccatggcaattatccgtatcaaaagtccaacggccggcggtgaactcattttgtctactggcttgtcattctttcggcactgggaagctcatttttacagttgtaaggtggtaggcttgtgtgtgtgtgtgtgtgtgtgtgtgtgtgtgtgtgtgtgtgtgtgtgttgttccaaggaggagagttcatacgcttttgttaagatctcaggtcctaacacaactatttggttttcgcaaatctagaagactaagtacactggtgccagggtgcttaatggttatgctttgaagcattcttttctcttctcttctcttctcttctcttctcttctcttctcttctcttctcttctcttctttcttttctcttttttcgagacagggtttctctgtgtagccctggttgtcctggaactcactttgtagaccaggctggcctcaaactcagaaatccgcctgcctctgcactgagatccaggatgtgtttagagtctgtctccatttgagctctctagactatcagagttgtttgtattgtattgaaggctggaatgtataagtccttacctgtgacgtctgcagtccctccgtggccagaattaaaatgctatgggtggctttacctcataccaggaaagcctctttgtttaccacaatcaatagaaagcaggggcttagtgtacaatctgtctcactagtaattaaattatcagtgagtgatagtatactttggcgacttttcccagtaagatttacacttacacctgggcacaaatacaaatttttaatgagctgtggtaattggaggcagtgaagctgggggtcttcctggtgtctacattctccatccatccctccgtggtgttgcatatgtggtgtgtgtgtccacactgattatagtgtttaaagagagcaagaagctaggcttgttggcttatttatgtctgtaaacccatgcttgggagattgagacaggaggatggctatgagtttggggccagcctgagctaaatagttccaggtccaaggatagacagcttaggatatagtgtgaaaccttgtctctgaagagaaggaaaggaaagacaagagaaagcaaatccttaagatactatttgttgaaaaaataccccattatggattttaaagaatccacacttttcatctttcaaagaacccacactctgacctgcgcctgtcaagccctaatatgttacaaaagaagcaaagaagatcagtggtcagccctccatcagcgtggggacaatctccaccccagcactctcttggcgagcaggttaaacatagtaggtcctgtagttgttagaaattaagcacatgctcactaagaatgttatcaactaccgaaaactagtcgacaatggagtctcggaaacttgaagttgagaagaaacacaaaaccaagtcaaagttgataagcttagctattattaaattccgttctcttttaagtccatgtctcgggtaggagactgtttaaaatctcttttattttaaaactttttggaatagtgtttatctctgctaagactgtcctctgtgggcacactgacaccacagctccttcaggagtttggccaggcctgttggttacttgtctttccttatagaagggagggagcaggggtggggtgggtttgaaccctcacctgcgtttccagccagctcttccagtcagttgtatgcagttttgccctagttgcctgtggtctctgggagggggtaggggatttagatgggaaggctgaggggaggctgtctgtctccacagccccgggggttcttcatccgtgctgggtgcaggccctgtgtgcagctgtttcagtgtagccacccgtccattctccacagcgccacactcactgctctatccataagcctaataaacccattggttcccttgagggaacttctgtggaatccccaccttggcttgtcattgagaccttagaacactgagacattgtcaacaccttcccaggagaaggaatatctgctgcagtctgatacaggggtgtgtagtttttacacggttttaaactggggtgtgtgtgtgtgtgtgtgtgtgtgtgtgtgtgtgtgtatggtgggactggaaggtacatggtccatatccctaatttctcaaccccatgcccttccagcatacctgtgaaaggcgaagagagttgggaagtgtgtgtatttcttcctgatcctgttctttacaatttaactggatttttgaaaaaaaaaatgttggctctgtgtgtgtgtgtgtgatgtatatatgtgtggacttccacaccatagtgcatgtgtggaggtcagaggacaaccatctctctctctctctctctctctctctctctctctctctctctctccctctctcgctttatgtgagttctagaatcttaacccaggtcatctgtgcttttcccacgggctagtctctcactgaagggctggtggccggctaagctcgcgtctctgacctcacccacagcattaggaacccgagagactgcagtcacacctggctttttatgtgggcactggggatccgaactcttactttcaaggtaagccacagggccattgcctcagcctctgatttgtgtcttttaaaaaggaactaaattgtacttttaacccttgctgccgcttggttgctcaaccttcttttcgaacaagtatttatttagatcagcttacagcctacctgaccttggtcacattcgcttataaatgtggtttaaatattgttttcatccactctctttactgtaattagaccagagctggtggatcgggccgcctgaaatacagcaagagtgaaccagctctttaatgggtttatgagggtaatatacttgagttgtctagtggatcccatccttaggatgctaatttaaagcttgctgcacaagccttagccaattaaaaagtttgtcattaaaaactacaagaattcttgttagagagagagagagacttgagaatataaataactgttgtttgccatcactttaattatgtggaagcaaagctctgttcacacagcctgctgagagtctgttctggaaaaaccatccactgagtctggggatgggaaggaggggtttgtctccattctgcaggtgcatcttgggaaatggggatggggtagagaaaggctgcttgattgacctttgacccctctgaggttgatctgccggttcagtcagagcatctcctccccggggtaaaatcagctggagggtcacacacaaatactttgcatgctctaacccctcaccactcaggggagtgtgcaaccctgcagaattagcccattatgggagctcattagaaaatgcaggtgctccggtcccacaccaggtgtgccgaattaaaactcagtattttaacacactctcgagcagtctgtctgcacactccattttgagaagcacggctccggctccatgattctttctgttgttttgttttttttgcattttggagacagggtctcatgtagccctggctagccttgagctggctattaggtgggcatggccttgaacttctgatcttcttgcttctgcctctggagtgcttgggactacaggtgtgagccaccatgcccagttcttaattgatcttttcagaaaacagtacccatggttgatttttccctttcttccttcttgtagtgcaattgcttttaaaaaataattttgtcaagtgtgtgtgactttgtgtgtgtgtgcatgtgtgtgtgtgtgtgtgcatgtgtgtagtacctgaagaatttagaagaaagcatcagattccttagatctggacttacctgacatgggctctgggaagtgaccctgtgtcctctgtaagagccccaagtgctcctatctgctgagccatctcgacggcccctccactgccgtgttaaatgggtttctctagtttctcaactcatggctttctctccagtctcctcgctcataaatggagatagtgctttagtgtccgaagattaaaggagtgaatgcagagctcttaaaacaggtcagagcaaagtgttcgtcgtctcggtgtctctgttattttcttaataactatccgcgccaccgtcactgctggcaccaagtgaccaatgcaagttggaggttcttgtcccaggaaatgctcacagtgagcacaagtannnnnnnnnnnnnnnnnnnncccaggaaatgctcacagtgagcacaagtaataactgtagtggtctggtccctctaccacagctaagtctccccatgaacgcagatgtgatgcccagctcattcacccaacttttgaaagatggtcatatgtatgtatgcgtgtgtgtgtgtgtgtgtgtgtgtgtgtgtgtgtgtgtgtgagagagagagagagagagagagagagagagagagagagattatgtacacatgagtgcagggcgtcctagaagccagaacaggacattggattcccctggaggcggagttacaggttgctgtgagccatccagtgtgggtgctggaagttgtacactactcttctaggggagcagcaagaactctttcatttatgtattttaaattgaagataaaggtttttctccttacaatatcttctggtcacagtttcccttcccctcccctcctccacatcattgattcggcatggtagcccaatgcctggctaaagatgaataagaatgtcacctcttccacgtaatggggaggaaagaatgtgggacaaggtaggggtactgtagaacattgtcttctgcataaaacagccatcatcatcatcatcaagagacacctgagatagacttgtaaacaagaatttccctcaaagaaggaggtggagatggttactggaccacctcacctgaggtcttgggcgttccctcctgcgcctcttggccatttgtatgtccttctgctctaattgtgtgtggtcacattgtctctgaagctgttaaggcttgtagaccatgaaaggttaaggagggtatgccatctctgcagttatggggaagtcagcacccatgccaaggggtgtggctaccttgggggtcactcataccctgtaaggaagcccagtaaactcattggctccccgagttgggctttggtgcaatcatttgttggtttgttgagaaatgtatgtctttcagagatgtactcagaatccagtcttagtcgggactttgttgtttgatggaagttatcgattccttatcaagagagccctggtcatgccaggatgtcatcaagtacttacagtccccaagcctgggctctgacctgcccaactggccattggctaatggtgatgacttaggacaacatgcacatgtgaagaaaatccagctgagaaattgttattgttctcctgcgagtgtgtggagcaccccccatccccagcacctcggtgagactccattacaaacagttgcactctcagactcttagagatctgctcagtgacagcaactgttgaagggataatcagctcaaatagaacagcctcaaggggctgtgagaaatataacacatcaaatccaacacagttctctgttgtcttgcatgaggtacaccccccactgctttgctgaacactcgatttcagagattgaaacatctgtttggaagatccgcccagaatgcagaatgcctatgtcttccttgcaggagctctctgcagacatcttttgttacattcttgttaatatttgtagcagatgcatgggtaccagggagtggagaggggggctatcctagtatatcatccagttttcccaagatttaaattgtgtttctttccttaattggaacaaattaatgggagtctgaaagaagtagtttatgccagtttgattgcctaacgattgcgtttacattagagttaaatgacccatgtccttgtcttcatgggagttttgccacgctgggctataaaacttcatgagatgggttggctgtgttgaactggctttatggaatgagtaaataaaaattaactgcatacaccctgcttatagagattagtccttttatttgtctgtctatctggctgagtgcagatgcaggctccaaagggaccttaattcctaaggctttctgttctaagataactggaggaaaacttctgtatatggtgagggagtggaggataaagatgtttttttttcctttaaagtactgtatttaatccataattgctcaggagatcaagatattaatttctgacatatcattggatacagctgccaaactcctgaaaggaaaggttatttaaacaccagtggttttaggttcaagtcataagtacacatctcaagtctgccatgtgactgataatgaccactatataaaatatcaaagagtggatggtggtttcctttatttgtgaagtccttcatgatttattttatctcattctgtgtgtgtgtgtgcccccgtgagagaggtcaggataggacattgggtattggatctctcagagcgggacttacacgcttttgtatccagctgacatgtggctgctggggtctgaactcccaccctgtgtctctaccctctaagctccaggaagacagcaaacctctctcactgactagtcatgccatttgggtacgtgtctcttgaccatcctttttctcttcattcattcattcacgtcttaggtgtctttgttgagcatttaactgtgtgtcagtccccgtgctccatgacagtttgatggttcatcatctccttaattaccgtgaatatgcacatgagtagcaatgtctgccatgcagctgaccatcccccagtcctagagtagtgctgcttctcaggctgaatcaaacagggctctgtttctaagacaccaccagcctggcacacacaacctgcagctccttcaaacctctccttcctcttcacttggaactatgatgcacccattgagatctgacgagtgcgtgtgttcgtgtgtgtgtgtgtgtgtgtgtgtgtgtgtgtgcgcgcgcgcgtgcgcacacacggggaaggaatgccaacataagggcatgtgttctcacccagaactgcccccattaacaaacaagccctgtgcactcagtataagataaaggcagataaggtttaaagagataattttaaggttctgctctccctcctcctcctccttagggctttgttttgttttgttcgagatagggtttcctctgtgtagcccaggttgtccttgaactggtagtgatttttctgcctcagtatccccagtgctaggattaataggcatgggcccccatgctggtcccttaaaggtctctttcaagctatttcaaccctcagattttatctacactctaacttggctggaactgagttatttgatcttcctaaaagtcatcatttgcaataattaggtaggataaatcggcttttggttatatgcctgaataacctaagagtatttttgctttttgcaacagtcctgtggctatgaaggagatcaccccaccactaccccatctcttctcttatgcagaagagggttgggctttgagagagctgaaacccctttccctgactttatgggtttggttggtttttgaggcagggtctctctgtgtaggcaggctggccttgaacttgtgatggtccttctgcttcgctcctctggaaacacatgctaccagcccttcgcttagtgggggatcatgcatgccatgatccatgtctggccatcaaaggacaacttgtgggagttggttttttccttctaccataggggtcccagggactgaactcaggtcatgaggccaggtgacaagcacccgctgagcctcttgccagccctgcccctttacttgctgtggggtgtattgatttgcacaccaccagcgagggctgtgtattannnnnnnnnnnnnnnnnnnnnnnnnnnnnnnnnnnnnnnnnnnnnnnnnnnnnnnnnnnnnnnnnnnnnnnnnnnnnnnnnnnnnnnnnnnnnnnnnnnnnnnnnnnnnnnnnnnnnnnnnnnnnnnnnnnnnnnnnnnnnnnnnnnnnnnnnnnnnnnnnnnnnnnnnnnnnnnnnnnnnnnnnnnnnnnnnnnnnnnnnnnnnnnnnnnnnnnnnnnnnnnnnnnnnnnnnnnnnnnnnnnnnnnnnnnnnnnnnnnnnnnnnnnnnnnnnnnnnnnnnnnnnnnnnnnnnnnnnnnnnnnnnnnnnnnnnnnnnnnnnnnnnnnnnnnnnnnnnnnnnnnnnnnnnnnnnnnnnnnnnnnnnnnnnnnnnnnnnnnnnnnnnnnnnnnnnnnnnnnnnnnnnnnnnnnnnnnnnnnnnnnnnnnnnnnnnnnnnnnnnnnnnnnnnnnnnnnnnnnnnnnnnnnnnnnnnnnnnnnnnnnnnnnnnnnnnnnnnnnnnnnnnnnnnnnnnnnnnnnnnnnnnnnnnnnnnnnnnnnnnnnnnnnnnnnnnnnnnnnnnnnnnnnnnnnnnnnnnnnnnnnnnnnnnnnnnnnnnnnnnnnnnnnnnnnnnnnnnnnnnnnnnnnnnnnnnnnnnnnnnnnnnnnnnnnnnnnnnnnnnnnnnnnnnnnnnnnnnnnnnnnnnnnnnnnnnnnnnnnnnnnnnnnnnnnnnnnnnnnnnnnnnnnnnnnnnnnnnnnnnnnnnnnnnnnnnnnnnnnnnnnnnnnnnnnnnnnnnnnnnnnnnnnnnnnnnnnnnnnnnnnnnnnnnnnnnnnnnnnnnnnnnnnnnnnnnnnnnnnnnnnnnnnnnnnnnnnnnnnnnnnnnnnnnnnnnnnnnnnnnnnnnnnnnnnnnnnnnnnnnnnnnnnnnnnnnnnnnnnnnnnnnnnnnnnnnnnnnnnnnnnnnnnnnnnnnnnnnnnnnnnnnnnnnnnnnnnnnnnnnnnnnnnnnnnnnnnnnnnnnnnnnnnnnnnnnnnnnnnnnnnnnnnnnnnnnnnnnnnnnnnnnnnnnnnnnnnnnnnnnnnnnnnnnnnnnnnnnnnnnnnnnnnnnnnnnnnnnnnnnnnnnnnnnnnnnnnnnnnnnnnnnnnnnnnnnnnnnnnnnnnnnnnnnnnnnnnnnnnnnnnnnnnnnnnnnnnnnnnnnnnnnnnnnnnnnnnnnnnnnnnnnnnnnnnnnnnnnnnnnnnnnnnnnnnnnnnnnnnnnnnnnnnnnnnnnnnnnnnnnnnnnnnnnnnnnnnnnnnnnnnnnnnnnnnnnnnnnnnnnnnnnnnnnnnnnnnnnnnnnnnnnnnnnnnnnnnnnnnnnnnnnnnnnnnnnnnnnnnnnnnnnnnnnnnnnnnnnnnnnnnnnnnnnnnnnnnnnnnnnnnnnnnnnnnnnnnnnnnnnnnnnnggttggagagagtccctctgagttccaggaagtgatcctggagtcctccaatggcaggagtataaataaccctcctttggtaggaaggaagactcagtaagggggtttgaggacaattgtgtttgtctcgatggagttggtgtagatctaaagtaaacaagggcaattccaaggaaaccttctctgtacttcagaggaaaagggaccagagatgatgaagatacgggttagccaaaattagagagatgtgactgttaattagaatttagagagattgctcagtgcgtctaaacgccgcacctgggcctccttcatttctaagcacgggaggaggcagctgagaacaaggctgccttccctgaatcgaagtgtccggcagccggggccagaagaggttacttcgagaatctttttgaggggtcatggtgcccgctcaaagccaagtcagagcggatccaggaggccttggcattgaacttcccgtgtgggaggctcagcagtactgatcctgggcttgagcggtgagatttcatttccccaggacagcagccaatgtgcagaaaatttatgttagaaaatttgagaactatggataacataaattaaaagaaaaagtagttccaatctacctcattcaaagagagtcaccactaccaatttgacttctgaactcaggtcaatgattaagatagcccaaacagccccaaatccacttgattcattggttatctactggggatccacaagtatggttgccacttagtaaggggggtccacagtggcacagctgacaaggagtttgcttccagctttaagtccatactctgagaggtcctggtcgcaaggctttgtaagtctcatgttattattggagttttgaaggtctaagcctgggtcctggcagccctaacaaggcagaaggggttccctgtccccagtaatgccaactgaaaaaaaaaatggtgagcaaatcaaagaagtttattgaatgtggccacagtggggcaggnnnnnnnnnnnnnnnnnnnnatgctaatgacgcccctcgtgcattttagggtgtgatcacattaagtgtaggattagagggtaagaggtacctataactaagccgttgctggtccaggtgtggctctgcccacctctgggccatcctggtcttggcttgcttgtcttgcagggtgactggtaagttgttaaaacgtgaaacctctttctgtcacctgtggtcctgctctggctgacactaggcttccgatttcccagtgttgtggtgggaggggagggcgggagaaatagtcctttggtttccgatgtgggataactgaacaggacacaaatgtcttgctttaggagcagcttcactacttccaggactcttacagtacagtctctgtatatgcaaattgctggtaaaaactgagtcacactttaccttggatggtggccatattggcatgcagtcaacatcaaagtattatttttgttgtctttttaatacgataatgaagagcctgttcacttgatgagagggctgcctgctgggacattttctttgacttcctagttggagcatggagagcaggggacctacccagcttggtggtggccaagcacttgccaagcatgcacgaagcccgaagttcagttgcaaacaccacggaagcaaagttcctatttcggagcggggaggtagtctgcctcttttccccaagcaggctctggcgtaggcatccttgttgcccaagggcaagggagtattgcatgcccaccccaccttttgccctcagctcacaaggtcactttcaggccagtcccctgtggccaggagacagtagtgtaagagatccaatgtagctttctttgtcacaatgtagaaagccttccctggacttccccaaacccttccttctgttatctcatttttaactgcttattttcccctactctaaggaaataaataaatctcaaccctgaatgacacagtataggtgaaatcgaataacaaaagactgttcttgctttctaagagaaaataaaactcaggtgctgtgttgccatagttacacggcactgtccttccataaaacagggcacagcgatatgtcagaaagcacttgatgaaccctgggaggtgcccatggctcttatggagttatccttgagcctgctcagggagtgaagtagttggaattttccatcaggagaaaagcttgtctgatgctttacattgcagggtaaagacaggtgacaggggccagatgtgatgctctgcgctgggggccttactgctccctatagctaagaccacatctgtgggggccaataaactgcaaaccagcggaaatcccagttgctgcattgctttgatttctgttcctcgttcacccgattattttctttattcaaaggatagtgctgcagacgctaggttgaatggtcttatcatttcatttcttctgtttgcattggttggggtgtttgttttcataagttactgtgttgtgtgtgtaagtgtgtgtgtgtatatatgtatgtgcatatatgtgtacgtatgtttgtgtgtgaatgtatatatatgtgtgtgtatatatatgcatgtgtgtatatatatgtgtgtgtgtatatatgtatgtgtgtatatgtgtatgtatgatatatatatgtgtgtgaatatatatatatatgtatatatgtgtacatatgtgtgtgtatatatatgtatatatatgtgtgtgtctgaatgtatgtgtggtgtgtgacatattacttgtgcatgtggagatcagaagatagctgggaagattcagttctctccttccaccatgtgaattgaactcaggtcattagattcacatagtcagcattttttaaagccagtctaaactgtcttgcttatgcactgctcattcaggctaagccgcttttctaatgatgcaggtcctggccatgtaggtggattttgtggtttcgagaccactaatgctgtttacaggtgtttgtgtgctgctggagatggaagccaggacctaatatgaccgaggcaagtgctcggcccaggaccttggctaccctttatcctctgtctctcagaggggacctccggcattcccagtgatagtgatgctcatagcagatgtttactggtcgtgaggacacatgcatgcatgaatgagctgatgctccaagccctgtactgttaaatactttaacccccatacagccctgggaaccccactagacggggaagctaggctcagtggggtttgagttttaccccgatcttgagctggagagtggtgtgatcagtaagcaggcctggtactcaggttctgtcctgtctgagggttcacctggaatgccttccctgctggatctgacctgctgggttgtgctgctttgcgctgctgatgccgatggatgcagttggaatgtcttctttttgtttgtcaaaagattgcgcaccggcacatgctttgtgggtcccgtctagacaactcttatagttgcagtggctaagcatgacgtactaaaaaacaaaaaacaaaaacccaaagaaacgcaaggtgttgctatgcagcccaggctggacttgacttagggtcccaaatgatgagatttgcagtatacaccaccatacctgacatttccacctcctctctctctttcccttgcaatgtgctgtatagtatgtgtactatcactggggtcttgttagccaaatttttcgatctacatgactctgccttctaaatacctggaatacaggtgtataccaccacactcgactccactttttttttaagggatttatttattattttacgtatatgagtacactatagctatcttcagacattccagaagagaatgttggatcccattaaggggttgtgagacactgtgaggcttctgggaactgaactcaggacctttggaagagcagtcagtgctcttaaccactgagccagctctccggctcctctgttcctcctcttaatgagagaagaaactgatttccccagaggtttaaatgccaaggccagggtcacaaagctggatttgtttttgtgttgtagaactggagaagtcgtttggccacatcacgcacggcttcctcccacccggttatcctcctctgtggtctcaggcaccctcctccctgagtctaagtctcctgtggctgggtccttcagggcagcctgtgagccccatcctaggactgtgtggtggtgctttgttgtacttgaggagtggggcatggctcgagtgtttaggtgacagttcccatgtgtcgcgttgatgagccaggaagagtttgttcagtgctggaatgttggacagcaagtctaacaatagacccgtgggcacagatgcggggcggcgaaggacagtgctccttatcttaaaaataatttgaacaccttctgtaactgctcagatgtggctaagatggactccgttggaccctagcattgctgaatggcttgtgtgtccggccagcagtgttttggtctggctggctctgggtgtttaattacatttgctgcctgaaccatgtttgcaggactgctgacccgtgtgcaaggcattcaggcgcaccgtgacgtgtttatgcaatatttaggcagctttcaaaatagggatctgacgccgctgccgatgctgccaagtgtgaactttaaattttaaacactgtgtgctccacatccccatgttggggacagaggagttgtatgcgtgtataactatctgcatgtgtatgcgtgagcccagactgcagcaggcctcagtatcatagcaccgaggactggttaaagtccgtggctgtgcctcaccccgagaatgtcctgtccagtaggtccacagtgggcagatgtgtctgtcgttggcagaagttggcagttgatgctgatccagttccgtctggagaccgcaccggggatgaaagagatctaggaggagtcaacattcaccggtgtatcaccaatggttgttcatctccaggcaggaggattaggaaggcttctcattttgcctttgaacttttctgttgtttccagtgacagggtgtggctgttatcatcaggagtggtattggagttattttaaggctatttcttgacattttgtgggcccatacaatgtttattgtcttctactgtctggtcttaaatgttttggagtaaaatcaaagactccatggtgcagtggattgtccctagtctttctgtagaatagccatataggaaggcctggtttgaagctggagtgatggcctcctggttaagagaatttactgtcattgttaatgacactggtttggttctctgcaccacatgttcgctcacagccacctgagaccccagttccaggggatctagtacacactcttctgacctctgtggactcctgtatgtatgtaatgtacatagttagacttagatgcacacccttaaaaataaagatcttttttttaaagggacctcacttctcccagggatctcctacctcagttcttgttacgagtccatgagttcagtagatgcttactaactccacttacagtagactcgaaggctgtgccctgcacgtctccatgaaggctgtctcgtgtgggtgaattgtctttaatagccctttggaagaacatgaaagaagggagaatttgtctaagttagtagaagtcacaagcaggatgatacaattctacatttggtctcagggtaagccagcaaccagtgagcaaaaccctggcccccaaaataacactgcatcctggggaagtttggccctggggtgtcaggatatgcatgtgcacaaccctctgagtgaagacacaggaagaactctgtgcctcccactagctgtgtgcctgtgcctcattgatatttttagaaaggccctttctcaattgaaaagtaatcatggttctcaactagtgtagaaaacatgggacttagaacccagggaagtaatgtttaggtttgagtctaccaaatttcaggccagttgattgacatcttggattgggccccaatctgtcaatgggcatgtcagctttgtgaatgctgtggactatcataaagaccaggtgatctgggctggagaaggctggttagcacagcatcagcacccactgccaccagctttgtagaaacttgcttatgtcctcgatctcccgtgctgaggaaggttctggcaaaactcggcatgtcttaggctctggcctatttcccactccacccagccagcttggcagtgacactggctgttgagtggcctgtgaggtcagacaacttgaggaaaagcaagatagcgactgaatcatgtttttcctgatagcacggagttcttttccttacccagtctccaggaagttaaagtatttatggtctccgtggaaatggagtctgttacataaaatggatccctcacctgtggaatgtgtgggtcgtttcctggctccctggctgcatccggaaggcgagggcttaggcgggtctttttttttttttttttttttttttttggggaaagttcttcaaggcatctcacagccccaggcgagctgacaattcatcacctccctagtaaatgctccgcagtggtttgataactgtggatgaaagtttcaaaacaaatcacaacttttgccctgctttctgcacatgatcataactgaggggcagggaggggactatttatggtatcaaatctgtaagcactgcaggtgggtgtagctctccttccctttcgttgctttgacttaggggtctttactaaggtttgactcacttagcaggtaccttatagtcacctggactacctgtgtgtccttgagggctgtgggtcatggtggtggggtcacatgcaggtcagtctcagtgtaaggcctcattactgacagacaggacaagaaagtaaaaccaggtcctggattcagttttatcctaaaatggatgctgtggtttaaatatgaactctcccctatgggctctgcaatggtttgaataagaatggctgccatagcctccaggcagcaggggctacaaccatttgagaaggattaggaggtgtggccttgttgggggaagtgcgacccttggggatgagtttggaggtttgaagaagctcacaacaggcccagtgtttctgtctgctgcctacaggtggggatgtagctcttcgctactgccctagcgccaagcatgccagcctgcacgctgcccaactccccaccaggatgacaacagactgaccctctgaaattgtaagcaagcccccgattaaatacctcctttagtaagactttccctggtcatggcgtctctgtgcagcagtagaacagtgactaggcaggtttgtatgttggaacacttggtccctaggtggtaacactgttttgaaaggttgtggaaactttaggaggggggggggctcttcgtgagaagtgggtcactggtgtcatgtgaccagcaggctccacccccccccagtgtcatgtgaccaggagactccaccctgccgctgtgacaaataccgtgtactttattccagtcaatacaaaacagttaacagtagaaaatgatgacccaggtgtcatggtgcacacctataatcccagcaggagtcaaggtgggagggtcataagactagtctggtgagacatcacaagaccgtgtctctagaaaccaacgatgatggtgatgatgatgatgatggtattactatttttttcttaaagagctgctttgttaaagaaattttttgagcttttgcttgtgatgagagatcattctagagggctcacatggtcctgatggtttttaatctttttcattatatttcatttaatgtgtcagtgttgtgtgtacacatggagggttgccaagtcttagggttgcctttttcttccaccatgcagttcccaaggcttcaatgcaagtggcaggggctgaggtgagcatctttacttgctgagccatttctccagccctggctcatactcttgtggatggcttctgggttatttttagtattgatgctctttcttaacatttcttcacattactgttatctgccactctttctaaagtctcaccgaatggttagtgtgaccacatcattccgaagttgacttcgggatttgctgtgatcttggccatgtatatttgcaaatacccttgtattttaaaaatatgatttctctgtgtatgtagccctggctctcctagaactcactacatagaccaggctggcctcagactcagaaatccatctacctctgccttctaagtgctaggatcaaagtcatgaccgccactgtcatattaaacttgattattttctggatggctgttttacgatgtcagttgaggcacaggccttcctgagagctggaggagacctcttgcccctgatgttctgttattacagcgtcatgggcatcatgatgcagacagcaaagaagaggtattcatatggagaccgatcttcctctgtagtctgcttctgatatgtaagatgtagtagaacaaaataaattctgggtttcctcctcccttcttggtcctgaaaacgactttggatgatgtcgtgtaactcatcctggtttctgtggcctttgctggtgacgcctgatgtggctggcaaagtgatgtccccaggtcctgagctgcatggtctctggaaatactcattttcctcctgtggttgttcctgacttgtgtagaaagaattctttaagcctcacctgagacaagtttggagtgttttggacattattgaccacaaactctgagaatatgttcatccacttacctgagcaacggagacacacaaacgtgcgaggacatcgtgggacttcccaggaaccaatccttcagccactgcatctgttagcaaaagataaatgtttccttctgagaattcatagcagctcggcataaagacggatttgtgtgcgctcattcccgccacctttatcacaagataattggtttatacaggctgtaagctcagccgcctcctgtgctgctgtgtccgtcagttggggtcaggatagggatgattgatgtgtttaataaacacagccgtgtgtggggctacatgggcttttcgtccatttgcgtctacttctttcagaatatcttcctcgttaataactaatttccaggtctgacattctggtgtctcctaattcatgaacagacccttgaacaaatagcactgccgatcttgatcattatgttagtagctactttattctgagtgagtgggtgctattaatcaaacatgtttttttaattattgcagtggaaactttaacatttaagtgcaatgtacacgtgcatttgcatgcttgtgtgtttgagcatgcacgctcacacacacacacacacacacacacacacacacacacaccacgggataacctactccttcccatggatgtaccttgatcttgccaatcccactgcctcagtcttttgcagacatgagccgctctgcccagcctcattggtgcttcttgtccctgcccacttctcagcagtttatatctcttcactctagtcttgcgaatccttggcatcaccctgtcttctcatctcctgtagccatgggctagtctctgtctgcactctcccagaacaattccatatatccacagggttgtgaagcctttgtggatgttttctttcttctggagggtatgtttggatgaagttaggaggataatttgaaacagatatggagaccatgtatgagcgttctcttggaaatgcatccaagcgttgtccactttcctgggtgctctgtgatgtaagggagcagatataaggcagaacagataacctaagcttggtaaagattcgttggtgtcccttctgacacagctacgccttcactccataactagctacaaccaacatcagaaaaattccaacctcattgtgcagtctaagtcagccttgcactcacagcaatcctcctgcttcagcctcttgaatgcttggattataggagtgtaccatcacactctgctttctaatccatggcttctgaactgttaatgctgtccttcccagaggtctttgcccttgctcaggagtgttggtaaccattgggagaaagcatatatattaagtttatggtcagtccaaactttaagagaaactgcccttggtaaaaattttatttattgttatagatatttcacctgacctgtctagtcctattattgcagagtttacctcgtaaagaatttctatcgattaagccaaggaaaatgtcagcttttatatcatacaaagaaggtcaccgctatacattgaacttggaggcgacagcattcagaatatcccacgggcacttcacagttgcactttgtacagaaaaatcctcaatctgaaggcagccgtaactagttttgtaattgcttgtcaggaaaacatttcagattaagaccgagacctgcgtctaccagtctacgtgacgtttctcaacttcctaataagtcatatctcacatgtataattagtgtctctgctcatggtgccttacagtttcaacattccgtggttctgggactgaaaaaaaaaaggtggaataacaattactttaaaattccaggatcagacattaaaataaagcattttgtgcatgttggtgcgtgagctgtcgaaagtttgtgacatggcctgtcctgagagagaaagagctggctctgtggattatagagattactgtgctggggcgtctaagctgggtacatcttagtgactggggagtttcatcgcccgaggtgagaaatgaagacttctgcggaatccttaagtcttgggaagattctgcacctcgtttttttgctggcccaggtagttagagcagtttatggagaatctgtgtcctttaccggagtcactgtgaagaaggtcccctcttaactgtcacgtgttgtctttccacatgtctgacaaacacagactccctaccaccaccacacacctggggaccagggtatagcacctcctgattttggaccaggggagacttgttagaatttcctgtcttaattgtgaagagttaactcaattcctgggccattctttaccccaatagcttggcagtatctctaatacttggttcttctggctccatctactgtatgttttcaactcattttctcctgaagacttaaggagagtacaaaaaaaatttttaggacattatttttgatgatgtatgagccgggcacaaccaaacaataacagcatatgcatacacccgtgtaacctgtgtccagtgggagagacagagccagtcttcaggaaaggggtggacactactctgtacccccacctgccctgctaatgtttccccgactttgttcctctgttcccagaagaatggttttacattgaaccacgacccccccccccaatgatttatttttagttttgacctttttgtcttttgaaatcttatgtaaatggaaccatactgaatatggtattcaaagacttcagtgttaagtttggggggggggtgctcaatgtcacatcagatggggaaccatgctgtaaaggcttggggtgtatacaggattatttttctgttcttaggtttggcttttcaatggttctgtagaaaacaatatgaactctgaattttccatgtcacttggcctttcaaaccttcaaggcagttgattcctctatgactgtgggcatttttctttttctctttctttttctttttctctttctttttctttttctttttctttttctttttctttttcttttctcttctcttctcttctctctctctctctctctctctctctcttttgtagagaaagaactttttggggtttttctcttgacttgagttctctcagtctgaaaataatgccttattcctgtgtgattgtacagatgtgccgtcctcctcctcgtctccttttagtatgtatgcacatgtgtgtatacaggtgtatgtgcacatgtgtgtgtgcagatgtgtgtactgtacacatgtgtgtgtacatatgtgtatacatgtcaaatccagaggtaaaccttagcatccactttcttttttgagacagttctctcactgtcccggagcgtgccaaatgggctaggcgggatggctagtgagctccgcggagctatctgtcccctctgcctcgtagcactggaattacaactgggtgacatcacacccagattaaaaaaatactcatttggctcatgtgtgtgggtgccacatgtgtgcatgccacaaagcatacatagaggtcagagagcagctagtgaggatcagttctctccttccaccacgtgggatctgggactcaaacttggatcaccaagcttgggggcaagagcctttctctgctgagctatttcacaggctctcacccagctggttttaaatctggtttctggggatggagctcaggtgcttctgcagtcatgaaaggcacttcatccctgagccatgtctccagttcatctcttcctttttatgtcatctctctagggtgatgttttagttatgagtttaagatagttaagggccagctaggaaccccagagacacagcctggccttgggcgcacaggaagacatgagttttcttcttcctgtgcatggcctcgctggcctctcctcccttcctctctccaccttgtttctcctaggttttggcagatattcccttccattgtgtcctctgtgagggagccagcgaagggacacacccattgcttcatctcagaatacccctatggaagtgaccacagcgctgataaaaacatcagctgtctgcatttattttcaaatctagaaaattccagaatgatcccatgaagggggttacttgagccactgttaaaaaagcagtcatgtggatgtgattccttactggagagggagaaatggcttgaaggtgaaatgacattaaatcagtttactacaaagcctcccagagactttgacttaccatcaagtttgtgagtgtttcagtggaggacaattagagacagggatttagagacctgtgtgtctgctgaagcccgcctccctccctcctgccactcaaccttccaccatgattagcaccccttgcagggccctcttctgacatcaccttgcaacagacacacctcttctgtcgttcactctggttccctccagccaggcctccagattacctggggtttttctagccatttgtcctttcacctgtctctgaggaggacatggacacagccgttcagagcaggctgtttcaggtcaccttcaatttagagtgtttattccaatggtacctttgaatgggagcagagtgaagacatagttttacatattgatgaaaagaatgcaattaaaaaatattcagaggctgaagagatggcttaagggttaagaatgcttactgctgctccataggaccggattttgtcaccattgcccacactaacagctagttagtttgcaaacgtgcagtgcagtagtttcagatggtataaagaaaactgtgtacaataacatgagagtgagtgtcaagactggtggaatagagatggtaaactgaggaaccttcccagagagaggaggaaggctcggggaagggagaacagactggggaaggcactgcaggcagaggaagcatgcctcacacacagatgcagtaattgtcttctcccagtagcaagtcggctccaaaggacctgcagtccatttacctcataggatgcacaggcccactgagggcagggctggcagggtctgctacctgctgccttaagaacaacggaataatctagggtaagccagcaaggtcttatgggaaagactttaataacagagaaacttgtagagaggaactgggtgaataagaaagggtagnnnnnnnnnnnnnnnnnnnnnnnnntatatatatatacatgcatatatatgtgtatgtgtgatcaaagtgctatatatatgtgtgtgcatggtgtgtatgatcaaagtgatatatatatatatatatatatatatatatatatatatgagacattgtgaaagaataaatctttaaaaatttacaaaagactatcaaatcggtggctaaccaaaataagacattttttttcctgcattggtaaagtacacactcctgttttatataaacatggctgctctcaagtgttaccagtgctcacagcctatgccgtgtccttctgctacagagttccaagtctctgtttacctatgtgttgactttctgtaaacatcctctcctgcacccaggcactgagccaggcctgaccgaggacagtgcaggaccagtgtcggccagcctttcctagaaaaaggaagagaagcaagcattgcctaccacgggcttcttaaactctgtctgaggagtgtttgtgtgacccggggctatatagatataaaccatagctgtgcaagtcagacactgtgaataacaagtcatgttcaaacagctttttggttatacttatatttttctacataacaaagatgaaagcaagtatgtgcactaatgagattgatataattgtctttttttcataaagaatttaaaatcttggctgaagggagtcaagcatcttcactgattttagaattgatcaatattttgattttataattgttaacgataagagcactgcttcccataaatacacaatacagaatgccagatgagtgtttggagccatttcagaaattattggaaattctcttctcatcccaagccaaaattcattaaatgatttaaaaaaggagggaaaaaaaacccaaacaaatcaaaaaccctgcaattcataccagcatctctagcagcagtttttaaaccaagcactctaagatggtgcaatcccatgattctgatcgttacatgctgaaacatagcacaaatcattgttttggaaagtcacctccttactgtttctatacgaaccgaaaacttcacacttgcagtgaagacatttcgatgactgacacacagtagttttaaatccgggccacagtgtgtcaggcagattgtatcggcattgcatggtgtcctggcgtgtaccacagagcagagacagccgtgaagtcacagaatgcaaacctggcaagccctgggaaaacttagagtagttgtacatttgatttgagctcgtgtttagtagttgtgtgttcagaaaccttttggcattgtcgaactttttgtgcccgcctccccctcattttgtatgtaaccacataggaggtcccaacccacaatcctagaactgggggtagatgacagggagccaggcagatctggacatcaccctggagcagcttgctgtagagtggatatgggggcaatgaagggacagtagccattccagagtccagaatggggacctggggaaggtctcaagggaaagacctttgtgccaaggagagagcagtagtgtggggtagggtgtggggtaggggggattgctacatgtgagagctgagtggtaggagagtctaatgagctctcaattggtgagtagaagtagaagactgccttctgtggacaccgtcaggaacatggctggcccttccctataagaataagaggttgaggggctggagagatggctcagcggttaagagcactgactgttctttagaaggtcttgagttcaaatcccaacaaccacatggtggctcacaaccatctgtaatgagatctgatgccctcttctggggtgtctgaagacagctacagtgtgtacttacatataataataaataaatacaactttaaaaaactaaaaaagaataagaggttgttgcaggggccatatgacttctaatttcatttttaaaggagtttttttttttttacattgattgattgattttgtgtgtgtatgtgtgtgtgtgtgtgtgtgtgtacacatactaccatgtatgggtagaggtcagacgtcaacctgtaggagctgtttttaatttcctccatgtgggtcccagggatttgaacgcagatctttgggctcagcagcgtcatcttgagtcatcttgctgagtcatctcgctggcaaccatgtggctactcctatgggcagtttacccatctgagaaatgagggctgtctccctcctatttgaatgagaactcaaaagatagggtgtcgagaaccatttgcagcatgcagaatatgttccaaagtcagcgtcaacctcctagcggtgaggtagatggagaaagctttctgtagtcatggatacacagcagaacctctggtggccgcacagaccccacgggcagctctgtgagattatgggctcagtgtccagctatggaactgtttggtttggttttgttttttctttgaagttgagtttgtcctttttggttttggaatagtgctgctgatggcttttataattaaggttgtcaattcagagcatccaatggtcttccctttctctttttgccttttaagttaggatggaagttgggtgttggcttttcattgccttcctgtggataaccagctcaggtcacaacagaggagaaactgctgagcttcagccacttgttcgtatctcaggctggcttagagtacagcgttctcctcacctgggtgtctacatggactttgctcttctgacttgcctcccgctccccccatgacttgcccaaatcatggacttccagcaggactttcagggacctgtgtaatcctgaagaattccgtcaggaaggttttctttgggttcctgttggctgtttgcctgttgggcaaatagcttgtttgtttgtggctgaccacataaatagcacgtgcaaatgagacgcttgcaatccatttggaagtactagaaatgatgcaggttttgcagctgctgggccagggtgcgtgcgtggcatagcgggaagggacatctgcagctgccttatagtgatcccacgcctttgcagaccgacctcagacttgcctgtttatgacttctgggccccatgttactcccaattcgtcttctgcactgggtggaatttcaaatagatctgtggatctctctttagccgtttaaaagcacgtttaggtttaaaatcaaagatttctatccctgttgtgttatctagtttgtttgtttgtttgtttaatcatgtacattctaacccagaggatgacatcactgtaagtgctaactacccctgtgacttttgtcacagacatatcattggcacctctatttgcagctcccaggtctgtattggacacggaatgaaaaatgacatcctgcctggtcagcatgcctcctaagatctcgttttgtaatagacatgatttccggccatggcgattcaactcaatgtgaccttgaaaatagatggttctgcatagatgccttgcggagttaagtgggctgctgactcagggacctctctgtgtggagccctcaagtggccagtcctgcaggctgtcaaagttaacaagcatctggccccggcaccagcaggtgtcaggtggagagagggcatttgtgagtaaaagcggctgacagtggaggctcttgtagcctgtgtgctgctctgattcctccaaagacttcatgaatattaattccattaaccctcactgcaccttttatgtggcagctgggggagccagcactgaaagtttaaacactgtgtccagtgtcattttgctacaaagtagcagagtgggagattgggtgaagctcggcattagcatctatgcccataaccaccatgctgggacaggctctcataaaaggcagccgtgggtcttgacttggacctttaggaactgttgtacagagcctgatgttggtttctggcatgcttgcttgcttgcttgcttccttccttccttccttccttccttccttccttccttcctcactctagctctgcttttctagaaaggatttctctgtgtaacataataaccctggctgtcctggactctctttgtagaccaggctggctttgaacacagagagatccacctccctctgcctcctgagtgctgggatcaaaggcctgcgccatcaaaacccagctaggtttctgactccttaatgtaggaagtgaaatgccatccaatggcagagtgctttacctcccatgtgtgaggttttgattcccccgtactacagagaggaaaagtattgttgttaatggtagcataagtgatacaagctttcatgtgactggaaagttactttggaaataaaagtagtaacagaaagttaaaaagcaccatccctcccaaaaggccccgtgaattggagtcaagtctttagtagcagcatctagactgagatacattgtattctgcgattcacctcatagtgtgctttactcttggtttgtgggcgtgatcctcatggtttgagatggtattctccttggactcaagtaagcctcccgctccagccttctgaataaatggaactgtagtgccagcacaccccattcgctcctgacctgaggctagtatatgtgttctgtgctgatgtgtttgccaaactcctcagtgtaatacttttgaagacaggaccaaaaaactgctcaaaacccatgtgggttttttgttttgttttgggtttttttttcctctctctctctctctctgcttaattttgttgtggttaaacccagtgtgaatttctccacccttggggaatcgtagccatagtgaccaggagcagggacgtggaagtccttgttgaactcaccaaagagaggctccacagagacagccttgcacgtggcctcagtggtgcctgtggccccagctgtgctgtgggaggactgatttgggtgtcgtcccaccttgataatgtttgtgaacagggcagaaggagccagtcgtgatggatagccattagacaaaatgacgtcacagaactgtgaattccacgtgctctggggatccgtttcagttttggaagagtatacagaagcacgggcatcaccattgtagactaatgccatggggatgcatgcagacacattcaccctagttctgtactttactgtaaactttatttattaatcacctgaactcagagaagtgaactagcgagtgagtctacgtagcaattaaaagcaaacaagtttgagaagagaaaacactacttttagtgtacatcaccctgtaggatgcagctaaagtccatccccccctccgccccccaccgttcagtcccagatagttgaggcgtgcttccgtgcaggcttgcttaggttactttctttttgatgatggagattaagcatagcacctcagcacacgctggacaggtgctctgccactcctgtcatgcctacccctgaccgagccagctgccagctcagtcagccaaacagggtcccaagagagggagtgaggattgaaaagaaaaatacaattagacaacattataacatgaccccagccagttctgaagctgaagcgggcttttttcccccccagtctgcttttatatcattctaggtacatataaagaatatgatcagtcctaaggcatagacaaaggtcccacgattactgtattcagtcttaacaagacccatcgagatataaagagcacattcctcagctgtattcatcttgagcctacttcctagtcctagcccagtgtcaaattcctgccaaattcctagaaggtggcccccaaagctctccacatactctacaaactttgagttgcccacatttgtcttgagcttactctatggggcaggtaagccttgaacttccaaaaccgggaaattggccttccacccagtgcgtagggaagcgttggtgacaagctgtttctctctctgccttttcatcccagtcaatcgtggcctgattatttggaaggtttgaggggaggaggtcactgtggcaattcacccatgacagacagcagagagtggccaatgggtagggagagatctacccattctccaaacccgtcaaacactgagctaggcagcatgtcgagatttcatccagtttggtctccctggccttcctttgtgtctagtcttgtgtctgtgtcagtctcaggccctgtagctctttcttcagctccagcatattgctaacagctggcccagtcagtccagggtaggggctgagcccaacatgtcaccgttcccacccacacccggcacacccttccatcgtcttcccaggctcggctgagtcctcctgatcgttcttggagatgaaacgcgtgatgaagacccaagcagctgtttcttcgcacctgcttcagaacagtcactcttctcttccatccgtctcttctggccggagcttggcaaagcgaggaccggctttctgtgtgcacttggcagaatgggctctacttatgtgtcgatcactgctctaagagcgagggctgtgtcaaatacccgtcgctgcagggttatattaataatacaaaagtcagtccacttggagagaaatgggttagatatgaagggctcaatgtgtgtagaattttagtttactgtaactttctagagttatggtttggaaactgtgtggaattttccagaaatctgacctggcatcaatttcctcttgctccctgctcctatctgcccttgctgttctgaagtcagagttgcagcctcactttacgctgaaggttcaaggtggaaggaaaagaaacataaggaggtctgaaattccatagtagttctcaaaaagagaactcccaggacttgtcctctctgtgtcgtcttcaccgttggtgtggacaggatggcctgggaagtaaggacatgtgtgtgtctgtgtgattcttttattccccactatctgtacctgtatacctgtacaataggttgacactcatatttagagatgaaaaaagggaacacgcaaatataaaaggtaaaactcaaaaaaaaaaaaaaaaaaaaaggagcatcttggttgtcaaggtggctcagcagtgtacttgctgccaatcctgacgaactgagttcaatccctgggatcgacatggtggaaggagagaaccaactcccaccctctgacctcctgccccactcgcaaataaatgaaccacagccacacatatatagagtcacatacacagatttacacacacacacacacacacacacacacacacatatgcacgtgaacatgaatgcacgtgtgtgagcacatgtgtacacacacacacacacacacacacacacacacacacacacagaattcacccaagtcctgggtgtaagtggctgaggaccatagtgaaggaggaaggaatattcttagagaagatgtctgtccttgctaatcaaatctgccctccacttctggttgttgaggcttgttttgtctttgtttgttaaggataaatcaagcactggatgatgaacagtttaaacaggcttttagcccagtattagtcgaatgccccatttggtgaggagttaccagctagcctgtatcttgggggaaatcataactttaaccctgaggataggtgtccatcacttaccctcctgagtggttctgagagaatgatcctgtgtcatgggaactccatagagtgtatttacacaagctaagatagtgttgctggtgatacaaccttgtgggaccagtgtcctctgttggctagtcactgacccaagtgttggtatgtggtgtatgactgtacttagaatttattgtgctcaatgtttgtctcattcatccaaattttctcaacattgttgaaagatgagatcgggcacattacccctttaaggcatttgttagtgcacacaggcatttatcagttgagctgctctgtatggaaagtggattggggggctccatcaaataggcacgaagggaaaccttcagtgtgaacacaaagcagaggaaagagatcgttgaagtctgagcagatgcctcaagcagccagttctctgccatcctgttggagtgggctcagctcaattcatttttcttacatagaaacactgggcagtgggtgtcatcctggtctcgatgcctcctttgaatccctcttatagtttgtttgtagttcatcttgaggttgtaatatcaccaagtttccaacctccaaagatagcatctatactgtattttattatggtatcaatcagttttcctcattaagggttaagagctacccatcacccaatccacactttcaaaaaagctggccaggtaagaatgctcagtatatatgacgtatgagaagatggtttcttctataaggagtccgttttctagaccagacactgagtccgagtgggtagccacccatgcgattgtggctccccttgccctggtgcccagcgtccgttcatcggtaagccattctccatcacagcatagacagaatcagcctgacttacgttggttttccaagataagtttctcttcccaagcgacaggagtggactttgcaaagcacctagaaggacaatatgggattgattttttttccccccaagaggcatgaaaactatcctattggaatatcagtgaaggcaggaagaaaggagaggggttgtttgggccagctgagtacatgcaccactggctgcaaaccagcatacggatcccttgctgctagccatgagcgctgtgggactgcagtgggagccatgctaggatgaccctggagggctctgtgaggttgcatttcacccgtctcacctcattgggttcagtagttcactgtagttacacaggacattgtgcggttggtcctctgtagattctatgtcccctagattcaacagcctctactgaccatgtagatacttaacacttcagtgcagcacctatttacctagcacttatgatggaggtggtctagatggtttaagtgggaggaggaggatgtgtataggttatatgccagcattctaccattttacataaggtagttgaacattcgtggacttgaggatctagccccacagatactcaggactgacagtattagcttggtacgtggtgtttcatgtgatggcctaaaataacctgagtgactttcccttgtcaaataaagcagtggtttaaggaacataaaaataaaacaacataaaataaaataaaacaaaacaataaggcagcaaaacaagaggcttcctccacaatacagtgcgcaaagctcttattatggcccctgcacagagcagctgcatccagtgttctctgcagaaaactcaagcgttgggtagaaaatgaaacttctggctttcttagcattaaaaacacccgtgcgtttttagcgtgacatccccacagcctgtcttgtctggatgggcggactcgctcataacagctagaccagacaaaagactagaagtcagaagtgaaatccccactgtcataggcataggtgtccaggctgatttccttctggctaattcatgggattccagggatacgatgcctctgccacaacacgggtggaatgtcttggttttctttgcttgcattcagaaatgtggaactgcccacctgtctgagtccatggactttctctgcctctgagctctggatgttttaagggaccctcgaagttccatagagattgttgaactggtgctggagacaattcagtgaatttaaattacattaattaagccctctccccttcttgagacatagtcttgctgtgtagtcctggccactctggaattgacatagaccaggctagtctcaagcttgggccggtcagtccccctgcctcttgactgcctctctgtacgtgggcacaggaagggtgtgctccaccacaccgcagcagagtcttctgagccccatgattctgactgctgtgagcgcagagggagagcgccccatttctcgggagttatttcacatttatgaatagttattataagagtatcatcaagaacaataaatcaggaaagcctaggatcgcataccctagaaatcaaaatccaggtcccgaatttcacatggaaggaaaatatttgcaaagtatgccaacctcatgttttcttacgttggaaccttcgctttttgatgttcctttgagtataatttcaatcgtttctgaattgttaactcgcaaaaacaaatattgcagatctggggctgaggctcagtgatagactcttttcctagcataatcaatccaacctctagatttgattttttttcagcactgaaaaaaaattaatattacaaaaagtcttattgtgtggttgatgttgggaggagggcagactttgttttgaaagttctttttcagtgttgaaataggtaaaacttaccatgttttaaaatctgtaccttcatgtatattagagtatatttgcctaacagtggaaaatatatatatatttcaacactagcttacgaaagtttatatataggtttggggatgtaacttagttgggtggacaagactggatatgtccagggtggtttggccctaatgtagctcaggtgatagggtgcttggctgtcatgcatgaagcccaaagtttggtctccagcatcacaaagttggctttagtggtacctgcctataattgtagcaatcagatgacaagagacaagaaggtcggaagttcaaggttatcctatgtcatccccagttcaaggccagcctgaattacatgaaaccctgtctcaaagaaataaggtgagagccaggaagaagattagcatgtacggctggtttaaaagaattcagctatgtgcaggatggctatagtagttctgtgtctccttcactaccatttcttaaaaccatttacaacatccccctgtgcatgtctacatcgagaggtttatcaccgcaggcagctagctgtatgtgacttcccagatcccattgcaaagttgctgaatttgtttttgtttttttcttttctttttctctttcattgtttccctctgatgtggccattgtgttgacaaccttctgtgtccgcgctattgaatttttttcttttcatcgtgaagaaaacctcccaaggtaagtgctggcgtggaactgggtatcagcactgacttagtacacaacacgatcccagctcgtcacgggaacctgtgggtgactcctggccaccgaggaactaagacttgtattctgatttaaaatttaagcctgaatcaaccctgagttaagtgtgttggccctgctggaagatcagcatgttacttaccctctgttggcaatgttcttacccactgttacattctcagaagatgattgagtctgtagacctgcatgccagggcgttctggcctgttgatctctaaagggaggttagcaagaagaaacaggtgctggctcatggcttaaaagtggaatagctgcagtggttggcataactgtgttggctagttatgtcaacttgacacaagctagagtcatttgggaagagggactatcaactgagaaaatgcccccatcaggctggtatgtaggcaagtctctaggacattttcttaattcataattgatatggaaggcccagcctattgtaagtgttaccacccttgagctggtggtcctgagttctataagaaagcaggctgagcaagccatgagagcaagccaagaagcagcgcccctccatggcctctgcctcatctcctgcctccaggttcttatacctttccttccctggatcatagacttcaaattgtgacctgaaacaaacccctcccttcccatgttgcttttggtcttggtgttttacaatggcaatgactaagacagtggtctttctagaaagcagaaaaataaacaggtcctcgggaatgaaatttgataactagttacaaactatctttctgtcttgccaagaagagttaatatctttggaaaggttttccacaagttcagatagaccacccatactgactctgtgtgctgggccagagctctttgctaattacaatgactgctaattagagctgtccccgctgccttgggcaacttttgatgacatttttaccgatggaaaccccagaggttcaagaataaatggcatagtcctgagaaggtatttgagtgactagtcctgaataaatgaaagtgcatttattatcagggagcactttgctaagtattagagagatgtttagtaccacaagtcactaggaaactgaccaaccctgggtaataacactgatcagagccatgctatctaaggtagaattagggtaaactccttctccatgtggtcagaatgtaggacacatgacaacatgggagaagagataggcttacttcccctggggctatgaagataactctaacatagctcttggattgtggaaaactgataaaatgttatttcatgccgtatatttattgaaggcatcattcatattatctctggcactaagagtttgaactccagcaaggaaggcatgcattgaataaataataggaggtgtctcaagaaagaggaagtagctaatgttttgaagcgagctgagctgggcattatggtcagatctggaggatcctgacagttgtccctgagtaatggccggggtgattataatccatagaatctacagtcttgaggtttcctgctctaggaggagatatatgtttctttagctatctgtatctttctttgctcccagaggtttcaaactatattgtcattctggtaataaccttgtttcccacaaagaaagccagtgtgttcccgggaccattcctcctgtggctgatcagagaaggaaaagtattaaagttgacaggacacaagaaaattttaacaaccgttagtactttttacacagaatatcctagtatgctggagtgtgctagagatcattcctaagaatggctatgaaattctcaaaagtagtgttaaataatcttattaaaaatataccattaaaatacttcatagctgataacccacctgtataagctacatttgggaagcctaaagattggcctgaaaccaagaaagtggtaagacagagtaaaatatattaaagacacagaagtaggcttttagggactgtatgtattgaagataagtggggaaaaacaaaggtactgttaagctttgtaagatgatgagatttgggcatcagtgatgatcaaaggcctcagggcagatggtgattcaccttaacaaattactaagcaggaacaactttatatgaggcagccttcgtctcggtgttctgatagtggtaagctgggtgtgtgtgatatgaaatcagttatgctgggaccattggaacaaaatatgtgacattcataggatgggaagatcctgttctgaccttgcagtcagaaatgacatactaggggaccagggtcacctcctctgtcaagttcaactgaaaaacttaaagtctgtgcttgggatatagatctgagttcaagccccagcatctactcatgtggtgaaaagagaaactggactggagtcccaaactctgacttccacaggcacaccctgtggttcatgtccccatccagatagatggatggatggatagatggatggatggatggatggatggatggatggatggatgatagatatataggtagatagatagatacatatatacatacatatatgcatgcatgcatacatacatacatgcatacatgtggttacaggtttttaagcctgtgctggaaggagctggggatacatcagggttagtaagggatagattactagaccaaggcccaaaggaccccagaaatgtggagagacaaatctactgttttgtgtgtaacactcaggtacaaacagcttcgaggcagaacaaggttataggcagcttagtggggcaggccgaggtatggggctcattcacgtcctgcgagagctgaagtccctgctaaactcccggtactggagtcaggacagtgggttgagaccaggccttgggtggcatgtaaaggtaaaacaggagagtccgctgtcaggtggatcctgtcaggtctagagtcacagtgtcacagtgtggtggcactttcctgaaataccaactctcgggggctggagcaggccaacctgggctacatagtgagaaaacatagcctatactgccagcactcaggaggcaggagcaggagaatcgccataaattcagagttacccaggtctgcatagccagtccagaccagctggagctacttggtgagaccctgaccctgtcttagaaacaaaggaattaacaaaaaccagtaactaaaagaaatacacacacttcccaatccaggaagtctcaaggcctgaagtcataatagagcaattccaggtttcaggtgcctgaaatgctacaggaagacacagatgtaattccatgtctttaaggattccacaggcatctttaaaaacatcatcttaactctgagggtgtgtctcagtggcactaatctagtgtgcacaagtacccaggtgcaatccctagcagtacaaaacagcaaaaaaaccccaagtgaaacacatattcagagataaattcttacttacttacacaagtaagaatagagacccacaaaggcttctgataccaaagtgttaggtccagactttacacgcacttgttatgtgtagggagattgaaaaaaaaggaaaagtcagattacacagtggtagcaagaaatggatattgcacagttcaagaaaccaataacccattacaaattctcagtctgaaaagtccaaagcctagattgtaaggttagtgttaagattctgtagcagatgagatcaggctgtgaacaccggttggtagatgatattaaagggttggagacaactgaagacccaccttttttaaagtaaactcagaccttccattcttcagaaaaattaatgtaaactgcaactctgggacactgtcagaaggtaacggggtgaggtggccatggctctctgacaacctttcacaggtgacactgaaagcaagacttaagagaaaacaacacagtgcccttgtaggatgtgctcctctgccagggactcgttaagtgtaaagacaagcggtgtgctgggacaaacatctagaaaatatccaataaaggatttgtatccaaattataccaaaatccctcaaatccagagaaagaaagaaagaaagaaagaaagaaagaaagaaagaaagaaagaaagaaagaaagcccaatctcaacttaaaactggacaaaaatatctgaatagacatttctccaaatttcagcataggtgtctgataagcaaataaataagctaataaaggcaacatcatatcattagaaaatccacattagggtctggagagatggctcagcagttaagagctccagctgttcttccagaggacctgagttcaattcccagcaactacatggtggctcacagccatctgtaatggaatctgatgccctcttctggtgtgtctgaagacagctacaatgtattcatatgaaataaataaataaataaataaataagcctcaatatcagcatctttaaaaaaacttagagagagagagaactcacattaaagcaatgagatatcaccacacaatataggatgcctaaagtctccaaatctcacaaaattgaaccgaaggctgggcagcaacaggaactctgccgtcctcactggccaaatgaggcagatggtgcaggctttctggaagacagccctcagcctctgaagaacctaattatctttttaccatgtgaccccagggatggagcctctaggtatttccccaagccaactgaaagtttgtatctactgtgcacaaatgtctgtgacaatatgaaagccatgatgactcccagcaggagactggataaggaatcctggtctactctcttgatacagtatcattcaaggacagaggagaaatgagctacccacccccacagatggcacaggggaaccttccctgcatgttaataagtagaaaaagccaacctgagaaggttagacgctgtgctctgagatcccattattaatccatggtattctggagtaggcgaaagtacatgccagtaaaaaatagtgtctacagctctacaacctctacaagcaaggaaagacagacaggtcagctggagcagggcgtgcctcctttttgatggacggagccacagacagagaatgagcccccaaacataagttagtatgtagcttatcttttagatttgtctgtctggtgagttctgaatggagaagtgtttatctcagatactgcccacctgcctgccttttaataacctgccgaacactctgtggtgtttgtgggagcaaggtctgtttcactcaagaacgatagcactttagacaaacatggagagacactggtttatacacctgtaggttaagaagaaagcctttgattcacaatcatcagggtatgagaggtgtgtctgtctgtcagagtgcaaaggtagtattgtgattgcttcttggttgagccatcttttgataagctggatttgggcgggtactggtatacaaggaaaagaaaggttcttctatccactctgctttactggataagataagaaggaggcatttgggaagaaataaaaatatctgctaatcatttcttttaggtcatatttgtttttagtcagtttgttcattgtaaatttatgagcaaacaataccttataacagtatgtataattcattttaatatttcagtcttgtgaattaaatttattttcagttttttcaaaacattgtgaagaggctccaacgcagggcttcacacatgccaggcacacgctttagcgatgagctgggtccctgcccaaacagttctctctcaaagcccacgttgtttaaaggcgctcactgatggcccagcttcagtggtatgtgtatgtaataccaatgcttgggagttcacggcaggagatcaagagtttgaagctagcctgggctacgtagtaagaccctgtctctgaaaacaaaaccaccaaaagctggttttataaacatctctcaggaaggaaggcgggaacctgcacagcgctgccatctgagacttgggttggttccgctgtctggtctttggttcagtgatggcctcctgctgcttcttctgtcctgctgagaataaagtactgggccaggcttttgagcatgcactccctggctcccagggcttgagctgtgtagtaagtataaaacacacagctgatttctaagatttcatacaagggtgagcagaaacaatgtagcacaaatagtttgtgctatactaaaaaaatgtatatactgggttaactaaaatactttactgaagcaaatttgtctttctttggcttatgaatatgtcatgaaagcattaaattacatacgaggctcccatcgctgcgctgatgaaataacattgctttggcattacatctcagccacaagcacctgctcttagctttggctgctctcctttcttccttgtgtctggggcttgggcttctgctgtcatgtctcaatggcagcctacccttccccatttacctctgttctcctggcgtggtcagagcctcagtctctggtccggggaactcagtgtggtgtggatgaccagacctgcaggatgttttaagtgacaatgggctatcctgcatttcgtctgcctccacttcagtcttcctgacctcacagaaagcaaagctcagggctgaacaaggaccctctggatggcatgcgtgcacgtgtaaagtctccagagacagaacattggggtaggaatcgtgatgtatataggggcagaagtaaggaagcaattggtgtgttaggaagtagtgagggctgagagggtagctcagtgggagcccctgtctggtgtgcatgagtccccgggttccatccccagtgctgggggtggagggtggggtgaaatgaaacactgagtgttaaaaaccaagagaaatggtagcttatagagaacctacagtcagatctcagtctggtaggtcagaaagattattagtgatttttcatgtattcgggtcatataagctgtagtgtgcatgcaagaaattgacctggctgcagatgcaagctacaccagtgaatggagaacacaggacaggcagtagggctggcctgttgctctggagctgccttgtgctggcctgctccattaggtgctcagtgcctagagacaacaacagtacattcctctaaagttagcgtcagtccaggtcgtctgtggctttagtgtgggctccagtctgaaggatccgctgccatctgggacttgctagtgcagtggctcacaatcccactgctctcagaacctggctgcagtcacgctgtgctcggataatgcacaggcaaagcgaaaacccgtgatgtggccaacccgctgtcactaggatgagaaattacatctcctcctgcaggtccaacaggtcacaaggccataatgggaacacataaccctttcaaagagggcagggagtcgtttggaacagcaacacaattctgtcacactctgtcattctaacacattttaaaaattttatttatttatttaatgtatatgagtacactgttgctgtcttcagacacaccagaagagggcatcagatcctcattacagatggttgtgagccaccatgtggttgctgagaattgaactcaggacctctggaagagcagtcagtgctcttaactgcggagccatctctccagcccctctaacgcattttaaaaaatttccagaagactttccgaaacacaacactgtgtatttttgtcttgacctaccttccttccttccttccttccttccttccttccttccttccttccttccttccttccttccttcctctctccctctccccctccctctctctttttctttctttctttcaagatttatttatttattttatgtatgtgagtacattgtagctgtacagatggttgtgagccttcatgtggttgttgggaattgaatttttaggacttctgctcgctctggtcaacttcactcacttagtccctgactgctccagcccaaagatttatttattattgtacataagtacactgtagctgacttcagacacaccagaaagtgcatcagatctcattacagatggttgtgagccaccatgtgattgctgggatttgaactcaggaccttcggaagagcagtcagtgagtgctcttaccagccagcccactgacttttctttagactgttcacctctcgcccgctttgcgcctggctgcattcagagtcagttattctcactgtgttctgtgcccaaggatgttcagagatgcagatggtgggatacgggttgtacacttctcagcccccaaagagaaaaccattgcctcccctgactctcagcatggccctgcttgctatccagaacagtgagagctctctggaccaggggaagcagctggagtcctgcctcaggcatccccagcagagtgatagatggatccttccaccctgtcctgtgtctgcagccactgggctgccttgggtcctaagtgtctgagacctggttcctggaagccagctagcttcctcttccctctggtagtacacactgggctttctcctacagggtgtgggaagcacagaaggtgagctctctggaaccaggtctaaatacctccttcagtgattggtgtcagggtgagttttagtcttcccttgtgtgattggcagaggcagccatttgtcaagttggcggacaggctgcaaactgcgagctcagaggcgctcacagcttccaccagtgtttctgagaggaacagcccgtctttagaaatacccatgttgcctttctgaacgcactgtgggagaagttgaatctttaattcttaattcatgagagaaccaatatagactatctttagacaggatgtggtacctctacccaaccctcagcatctggtgaagcagatgctgggagagactgataaagatgcaaacacgaactgaacggagcattcgaaagagtcaggatggagctcctgcttcactgagtatgcaccactggtttacacggacccagtgtcaagtggaagccctgtattactgttaatgtcgtagcatggggttcctattaaaaaggaaggtgtcaaatttccttttttaattgatgacaatatggatgagttcctgagagagacacccttccctcttccctcttagaatgctgagtccccatctaaggtacttgccagaagtgtagttccctcctgtggaagacctgatggggtctctgagcttggggcaatggtttatttcttgtgggtgtgtgtgctgcagatgctgttagctgctgtgaatcttcagccaggcagggttgactgtgaagcccaagacatcatgtggtgtgtagttacaagtgtgtgtgaaagaaatgattaattacactgtgaaaagacagcgttgacttgacagacttttaaacaggaagagaggtctgtcagcggagctgactagtaaggctggttggtggctctggtgttcctctccctgacctgtggcagctgtggtcaggcacaggatgaagtttgtgttggtccaatgaattctacaaacagcagcagtgaggacagacctggactcaaacagggtcctgtgcagttgcagtctgggatttaagtggggtttaacttaaaataatgaataataataattaataatacaactagcatatattgttacacatcgtgatgggtaacttttataataattctgatggttggaaagaggaaagtgagaaaagtattgaaaatgcccacatggaatggaatatagaacgttccgtgtcttttggtgtgacagtttttataacaccacgttgtgaaatgggggcagaccagaaacatctttcttatagtcaaaaagttataaagtaaaaaaaagaaagaaagtcaaaatagatgcccagcaagcctgtgttccagcaactggagccattgaggttggcagagtggtgttgggcacagattccagacagtgcaggatggactgtgaacggccgctgggtctctagatgtgaacgcagagttcgtagttcaaagaggccatgaagctagggtagagggaagaaactgttcgctcacacagagcagaggggcatcacatggagcggacttcttaagcattctagagtgaggagctaggaagtcacgcggtttgcactagtgttttctgaacagagcagcacatgaacttaaaaaaaaaaaagactttatatttttgtgtgtgtatttaacttagtgaatctgagcccttacctaacctagtaagaaaggaagaaatgaatgggcacagttcctagaccagggaggctctcagtgagatgggggtgtgaagcaaagaagggagaattggagaattcatgaacacaagaattctgcctatggggaaacacgagtcttgtctttcctccagtggaagtgaagagggtcttcaccactgtctgtagtggggaggtatttacctgagacaacccttgctgttgtttcaagtgtccattatatgtgagttcacagattgacaagacgcttcagttaagggaggattcactgtcttagtcagggctactgttcgctgtgacgaaacaccagagccaaaagcaacttggagtggaaaggatttatttggcttatgcttccatgtcatagtccaccactgaaggaagtcagggcaggaactcaaacagagcaggaacctgaggcaggaactgacagaggccatggaagggggctgtttactggcttgctcctcgtggcttgtttttctggtattttttcagaacccaggacaccagctcagggctagcaccatcctcagtgggctgggctctcctccagcaatcactaattaggaaaataccctccaggcttgcctcaggcctgatcatgtggagacattttcttaattgaagttcctttcctctctagctgtatcaagttgacataaaactagccagcacaatcaccaagaagctgtaacaacagactaaaaaacgtttggattaattatagaacatgagagcaaagcccttgacctcttaataaataataatataccaaaacaaagggaaccgtgcacggagctgtgtgtctgcatgtgcacagacgcagttaggtaggcatggagttcagaggaattagaagtgtccttgtccttaagcggctgaagacgccagggctgaagctgcttggtgccaagcctgatgttatgggtgatccctgggacccaggcctttacccaaaggaaaacactgcccccgtgagctgttctccagtttccatatgtgtgttgtatcctacacgagactgcacatatatcatacacacacaccgcctccactaccaccaccaccaccatcatcatctattaaattttcaaaagaagtacccccagtaaaggtttcataaagtgggggacatttaagataacattgaaaatgttaaattgaaacaagcttagatagacccaggttgcagaaatggacgttggttttccaagttttccccccatatacaattaaattattgtgccataataagacgtagacaccctttcctcctgggaaagggatgaaaaggcgtatgaaaattatttctaaaacaatatatgtattttttaaaggaataattatttcctcttttgtccttttctgggaggggtggctggagtctcatagcccaaaggtgacgatgggctgattcacttgcctcactctcggagttctggggtttcgggagtgcaccacggcacccaactgtctgatatttttaactaggtatatgcaactatgggacagaaaatgtaactgacaagtattagggtctcaaacagagagtgacaggtaggattggacggtaagatggattcctgaagtaagttcctcgtggttggagaccttagtgaaagcacaaaactaggcgagatcaaagctggccacagaggggctggagagatggctcggctcctaagagcacttgctgctcttgcagaggacccaggttctgagttcagtttccagcacccacagcaggtgctgcatgtaattccagaggggcatctgatgcccccttttggcctctatgggtactacatgcacatggaaaatggtcatgcacctaaaataaaagtgtattctttttttttttttttttaagatgaagaaagccacagaacccatatggttgaggtaccttctcattggcctttgttactctgttaagctagggtcttagtctctgtgtagctcaggctagcttcaagctcttgaccccctacctcagccttctaagtgctatgattagagctgtgtaccaccatatctggaaaatgggaaaatggctgcagagcacatttctcagaactctggtgccttctgcttctccttggaatgtgcaggatgcttctttcagggttttttctttatttaaaccacaattgaattttgctgcaatgccaccagagatcacacttctcaataagcgggacatttgtgcagcgtgctgctcacaaatactgaaaccgcctcaatccaggatatatgtcagtcgatgagttcatcttattaaaaccagacttaaccgcttcgccacgtgcacagcagttcacagaaatgcagagctcatgagtttttttttaaggacccaatggagttggaacagatggacaagctgctaggagtttggtgctagcgtgagtctcacacgtggtgggctaaggaaaataaaaaaagtgggattttgctgaagacaatgggtttgtaattttataaataacttgagaatgtctgtacatttggctttttctggttaaaaaggtgtgaatttctggtgttagttggcattgatgaaataggcagcttaagctccattctctctctctgtgtctctctctgtctctctctgtttctccctcccttctctccctccctctccctctctctctctttctccctcactccctccctccctccctccttccctcttttctttctatgtgtgtgtttgctgttgagtcatttagaggcatcccatgctgacccagaacttactatgtcactcacacaggcataagacttgtggcaatcctcctgcctcggcctcccaagtgctgagatcccaggtttgagctcccacacccagcctccatctgtatgcatttgttcggttgtatgcaggctttcggtgtctcccatcaccgactttggagtgaggatacaatcggcttcacaacgagctgtggagtagccattagggactccaacggaaggagttagtcctagaacaatacaggtctccagtatgatgcatggcgtcttatatagagtgagatgagtcagactccagacttcttccttctaaatgtttactgaaataaaagcccacactccatatctggcttgctgggatcactatcctaagtgcctaggaccagcgtttgtgaaatccaggagatcccccggctcgaggaggagaggtcagtgcttggtaggcaaagaattccagtatcttgtaattccttcagagcccctttatgcttgctagcattttaatatttgtctagaatttaagggggagatatggagaatgaaattttatgggttttttttcctattagaaacaacttcaaattctcaactgttggaaattattgcaggatgagcagggagtgctactagcacatgcgtgctccagcttgggttgggtctcatcccatttcaagtagcggccctgtgtatagagaccagtagattggcgactccatatgcaagacagcaaactgttaagaaatggcccaagatgggcaggaatgccactctctataggaactaataaagagacctgtcgtgatcctgaagacactagtagagatatttaaaaattgggaaagggtttgtattggccatttgcagtaaggttggaggttgaccttggtggaagacaaagacaggatgaaagagaagcgttacctggtttcatggaggggcaggggattgcagaatctccattctggaactgtcttaaaacaacacaggtctcttaggggtagtgttgaggttcagtcctgcccagatgcaagaagatcatctggactatgcctgtgtggacttttgaatcattgaaagaaccctcacaggcagtaaatgtttgttgctttgctggcagaaactattgtccggtagctgttcgttacaaggttgcctttggtgggtgtgtccgtatcaaatctgaatctggagtcaatggtgtaagtgatgagtattgcatgtgcctgaatctgtgtgttgggatgaaactattgtacgtatgagttagtctttcggttttgtttcatgtgtgtgtgtgtgtgtgtgtgtgtgtgtgtggtgtgtgtgtgtgtgtgtgtgtgtgtgtgtgtgtgtgtgtatgtgtgtgtgtatgtgtgtatgannnnnnnnnnnnnnnnnnnnnnnnnnnnnnnnnnnnnnnnnnnnnnnnnnnnnnnnnnnnnnnnnnnnnnnnnnnnnnnnnnnnnnnnnnnnnnnnnnnnnnnnnnnnnnnnnnnnnnnnnnnnnnnnnnnnnnnnnnnnnnnnnnnnnnnnnnnnnnnnnnnnnnnnnnnnnnnnnnnnnnnnnnnnnnnnnnnnnnnnnnnnnnnnnnnnnnnnnnnnnnnnnnnnnnnnnnnnnnnnnnnnnnnnnnnnnnnnnnnnnnnnnnnnnnnnnnnnnaggggatgaagaggatgaagatagtggtgtgtgttgtggcatatcaccctccctcgttccttgagatggggtctttcactgaacctagagctaggctgggagccccttcccctcaaccctccctactttgtgccccttctttattgctggacttgcaggtacacacgctcacttggagcttttcacatgggttctggacatttgaactcaggtcctcatgaccgtgcagcaagccctttgacctcctgagccatctcgccagcccatgtaagacttgtataaaaagtacctgtttccttgcaaaagtttcaacgccatgaatcatttgataaataattccaaagcaatgaatataaatattgcaggtttcaaagatgaattaaatatggttcctgccttcggggaacttaggatacaagtggaaataaggcattcatagatcatccagctatgtccaacctgcagcccgcaggcttatgccgaccagggtagctatgaattcaacccaacacatttgttgaggtcactatatcaaaaggatgggcattcctatgtcatgatgagtagaccacagaaaaaagtagaatgaaagcagagagaacaattaagtactgtgatgagataacagagaaaggggagagtccttgggttgtattcaaccacattggcccaggccttcaataagaagcatcttgaagggtggacatgaaaagcaaaatggagttgtgtatgcctagtcactccaaaaggacccactccactgtggccgggggagcaagggaagtagttggtaaggggcttgtggtgtccagggtgtcctgccaggctgagtttcaggctcagagcttgtcccttcaagtgttgaggcagtggaggactcctgtgtgggtggaaagaaagcctccgtgtgcagctccaaacagaggccacagagccattggcactgccccaagaggctcacacttgcaggctaacgttactcatccataagtatcctccaaaaatgaatgacaaaagttgagaaggccaggcatatagatggctgtttactggaggacttcccaaagctttcaccccggggaacccgaagccgggcagtcagtgtgtgcagttttcagtgtgatgttattgtcccccatgagccatctcgtggaactcctgttccccgggacacgctctggggagtgtttttctgtgcgtttgaccaatggcttgagcacagggagttggcacttgtgtgaaaagagcgtggctaggtaggagttcttgtctggtcggcattctggagctgtgtggaggagggtttagtgcctgagttgtcagcctgagatactcagccaggggttgtgtgttgaaacagtgaggaagaagggaatcccagagtgtgaagggaagtggcctctgtcaagagatgatagcatggtggatggctaggagaaggggctggtgtgaaaatagacccgtctaacgttgctcgagaaggtgtgggagagaaaacctaaaggtttcagtgcacaccactagacctgtggggtggggtggggtgggggggatttcttattaagtatagttttcaataaaccatctggttcttatgtctgcctgttagaattccagataaacaggagtttttatgagttcactactgtaggacagttgcccccaaaacaacttccagttttccctatcagacgatagtgagcctaccctcatcctccctgagcaggacccctgcccgtgtnnnnnnnnnnnnnnnnnnnnccccccccccccgcacccgattcacctctctggagcgcattcttaagctttatattttgttcttccattcaggtgtttgcctttgattattgcttttggtccatggatgaatcgaacacaacaaaatatgctggtaagttggctgttccctctgggcttccggcctttcccgctgtgtctgttttctctaattatcccggagtttccctgtggtgtgtctcacacccactctctagcgggtgggtttgcaaagtcggtgagctggctccaccatttccttgctaagcagccttagactgggtttaacaaccccaacagagggttgtgggtaagggtgcatgcacacctgtggttctggcactaagggggctgaggcaagaggattgccttgagttcaaggccagtttgaggctgagctacatagccagtgtttgtttggccaggcagtgctaagtagcaagactctgactgcccacctccccacccctgccccatacccaataccccataccaccaaaattccaaaccccattaggtctttagttgtctgcttcttctttttttttttttttaaagatttatttatttatttatttatttatttatttatttatttatttattatatgtaagtacactgtagctgtcttcagagggcatcagatctcattacgggtggttgtgagccaccatgtggttgctgggatttgaactctggaccttccggaagagcagtcgggtgctcttacccactgagccatctctccaaccctagttgtctgcttcttaaggatgtcactggcctcagggatgctctcttaaactttacaaggtttaagtactatagaactctgagttacaaaagcatggcctggctactgtgctaagggagatatagacatggcgctgaaagcgagcatctaaagtaagtccaaaaggggaaaatggtaaatattgaggttaggtgtgtatgttcagtcacctgactcagtcactccagagtgcattcatatattaaaatgtgtacgtaacacacaaataccagtcttacttgttaattaaaaacaattaagttaagcatgtaagaggaatatcagaggtacccagacatgaagtgtcatggaatcaagggaaatctgtgggccttgatgtcaggtctgggttaaaaatcccagagccctgctttggctctttgggagatgtgtttactttctctgagcttcatcacgcttcctataaaatttgagaggcagctcctgtggaactctgacgccattgggtgtcctttagggtcactaagggactgcaatgctgactggaggaaggtacccataaagtggtactccatttgagcttcttgtaaggagggactgggcatggtgctagcaggggcctgagcagagatggaagcgaggctgtgatggcaggaaatcctcaaagccaggctaagaagtagagatcagtgaggtgaaaaatgtaagctgatggcaggggatgcttgagacagtgtagcagagatggttttattcctgtatccctctgcacatgtcttccatcgctgcctgcaggacaccacggtagtctcttgcagtgtagcatgcaggcccgaagactttcttctcagccaagtacaacttcattggatccagatgataagaggtctgtgggatttaggatctgaggaacactgtgatcagaattataaatagattaaaatgattttttttaatgtacgggtaatctaacattggcacaatttttggctgagtgaaccattcaaataagtttcaattaaccttgaaataaggtctcttgattcatggaaacatacatctttacagtactgaggggaaaggtagaacttttcttattctgtagatatggtcattattacacacatattataacactcttagcaaaatataaaattcatggtccctgttctctcgggtgttcgactatgatcgagaatctgcataggaaacgcattgcttgtaggtgagatatgtttggtttcagcactaatttgacttctgttttccttgattaaaaggaacagcagttcttggctgtgactagagacgttaaggtggaagcattcattctctggtgagaagtaaggggaatggggagagagaaggacagagttcctgaaaccaacctatttgtcaggctccatgaagaatggcctcattgagcctgagtccaggctctcaaagcagctctcaaaactggggtctggcaggtcgagcgggggttgttagatgcatgggctgggcaagccaaggatgccagatccctcaccgcgtcatgggctgggtctgaacattaaatcctcaattgagtcttgctgtttgttagaaactttcacgagatactctaccctctctggctttttgacctgaaactcttgagttctctggaatcgagaaggacacctcaaggcttgggctgaaagaatgtgagtgcttgcatcagacaatggggttctgattctcgacccccacctttgcactgttggtgtatgtgtcacagaatcccataaaatgtgtcctcaaatgtctcattgtctcactgtgtcagggccatgggtagcatcagtccgttgacaaacaaaccaaccaggctgggatttacggcacctggttttgccacaagctgccaggctttggtgagataaagataacctttttcctcatctgtggacaggatgaggtaaaggattgcagccacgtctcccataaagccgaatcatccattttgtgcggacaggcacagctgtggctgtcccggcttctttggcgaatcaaaggctggcttgttcggccgttagcgttgcatggaagtgaagtgcgctttggagcactgtgcacttgaagtatctcttcctcctcttaccctcttggtatgttggtattgtaatgtctgacaggtagttttgagtctgaagcaaaagtctttgtggtaggaataattggggagggggaggggaggggagaaggcagacaagttactagactgcagagttagacctcaaacctgccccctctgtgtaaactcacctcttcccccaacctcagcacgcagccacatgtagctctcattacaagattagaaagtggctgaattagagtccatagtgataaacctgagccatgtcagtaaaggattacatcgtgctaatggtaattaagaccttcttgatagggaatcaatatattaaaaaatctcatttcctaaaatgagccctgccggtgggtaagtggtttccaagagctttgctgtctatttcctgcctgtttatctttgaatcttactgcagatagaaaaagcagtctgagggctggagggatggctcagtggttaagaacacctgctgtccttccagaggaccggcgtttggttcctggcagccgcatgggtggctcacgccctccagtgactccagttccaggggttctgatatctcctcagcctctttcacacgtggcatatacaaacacataatacataaataaaaataaaaaaaagtatttttttaaaagaaagaaagagtagcagtcgggtggtggcatacatgggggttcgtgtaagtaattttccttggcatggagattctgaacattgtcctagaaattatgtaatctttcttgccatatggtgttttgctcaaatttactgaaaccatgtgttcttgggcatttgtgggtaccccacaacctgggagagaagatttactgctgactcctgatctcctcatgtgtttcacactgtgtgaggatacaggagcacctccaggctgagggctgagctgcaggccagagccggatggccgtgtttgattctgttcccatctgggggggttatgtggtcagaggtggaaatgatcaatttctcgttgcttaagggaattgagacgatagagccagtgtgcaccaaaactaacattctaagagctatcggttgccaaattagaaccaaattgcgggcagaatggcataatatcaatagggcctaatgcatttaggcgtaagcatttgatggttgaagtgaactcttagtaactacctggagaaaaaaggcccaggctcttggggttggctttcttggacccaaacggtaggcaatcataacagtccttcattatcaggaacttgaggatgaattgagactcttagcaagttctgtgcatcccggaagtagctgacagttattagccattccggaaagctgcagcagttcttcatgtcgtcagcaggaacactgatgttggctgctcagacatcattagggtcagcctgtgttgtacacagtgcctgctgttttgaaagccgctaaccaaagaaacacagcataagccccttccaggtctgatttcgttttcctttacggcgttttatcaattgtctcacacgtgtgaccattctagagaatctgcttcatcaagatcctgagcgtcctaagtccttaagatcaacaattcttcttattaaagaattttttattaaaaataaagaggaggagagggggagaggggagaaaggggacacacacacacacacacacacacacacatcagagaacagcttgctggagtcagatctctccttccgttaagtgggactcaggttgtctggctttggcagcaagcccctttatctgctgagccatctcaatgacccagaaactcatttgtttaattaaagtatataatcacaaagacatccatttgatataaaccaacttggaacccagtacgactgactctttatagatcatacctcaactggtagaagatttggggatcaggcttatatcaataaaggttattgatatctgtgaatctcaagagctggacacgagtgagcagttcagttcaggagaattcaattggtaaagatgcccaaaatatgaatgagcaagttatgaactttaaagtagacatatatgtttatttacatttatagcatatatttattatataatgtgcctttttctctaccctacccccaggccccttttcaatttggggacagggtctcgtatatcccaggctgacttccgacttgctgtggttgaagctgagggtgactttaaacttctaaccaccttgcttccacctcccaagtgctgggttctagtcgtacaccaccatgacagggttcatctgcactggagctgggacccagggtgctgtgtgcacagaaacacacagccctgcctccagatatcctttttaaatccttcctcaccccaactttttcatgtttcctttttctaacccagaaacatagctgtgttcagaggggcagataacggtcaccacggtataaaatacagtccacataccacattccttcccggcatggtgttgagccttttgcatgtgtgtatgtgggggcagatagaatgaccagaaggtaaagtcagataggaaatactgttgtccacatttcacagagaagaaaaatagaggtttgggaaggttctgctaccttttaggtaaaagcagtgaccaatgtgaatggaaacagaaacaggaatacattctatcgatgacgtaaaaacagggatacattctatcaatgacataaaaacagggatacattctatcgatgacataaaaacagggatacattctatcgatgacgtatggattcgactcctgtcctggacatgtctcgtctccctgagccctagagtggttctgtcaagaagccgtggtgtgggactgagctgggagtgttagtacctgaatcttctctccagacagatgctgtccaaactcctgagcccaggtgctcggctgagcactatttacacatttccccaagaccaccacagccaggagctctcgaagggacagaagcttgagccggctaccttactggagagaatccttgtcaaatgctgtcagagctaagggacgcttctttgtcagcagccgttcgtgtggagacaggctccccagtcgatcttgctttctttgctccttggctctcttccctgtgagtcagccacttcatctagaaataacaacaacagaaacggccagctcatgccagccctagcagtgtccctgggttggaaatgttgtctgggtaagacactccctaccatggtacaaatgacacttccctgaatggccattctgatagcacttggatgccacagtggaaagtggcctgaggcttcctttcacttcatggcccagtttctcaagttctctttaccaggtcccttcacagtaaacttctgaagttgattgaaaaattaaaatttgcacctccaggtgtaggcttaacgtctttgttcctttatctgaactagagttttgtttcattcaacttaaatatgacctgaagtctctggatgtgagaaattttgtgagttgcactccccacgccaaaggcctttgaggaaggaatttgcttaaacctcattcaaataaggccttcttctccctttgaggtatgcaagcaagacctgtccattcttgtactatccaggtgctcagatttggatctgggcccctgccaagtccagagtcatcaaaattactgtggctgtcagccctgtgtagaggagaaagcaccttcataaaggagcagggctgggagttgcagctcacaaatgcacagccaagctcctgccagcccaactctagagggaaaagagatgaagaaaagaaggggcttaagagatcaatttgatctcgggttgggtttgtattggttagcttccgtagctatagggaacctgagatcaaaccttacatagagagaaaagctttggaggcctcagttcatggctgattggccccattgctttggtactgagataaaagacagcatataatgactggctgcaaggtagattaaaacctttaacctcaaggccaagaagtaaagaaggaaaaactggggttctaagtcttcttcatgcgtacccccaataatccaaggatttctctacacacttaggttcttaccatctaaaaactccactatttcccactagtactaccctgaacagcaatctttaacttgtgggactttggagacattaaagacctaagctataacattgttccaatcttagatcctatactctcccacgtagaagtatattctgttcgtggaagtctatactgtgccgcaccctgctgaagagttctatccactctgctgtgtccatggtggtgctttttttaaatgtggattataaacaacttggaccataccctctttcttcattatcctacttcctaggccctggtccatcctgtctgttccgtaggtagatgttggacacaggacttagttgtcttttcccttgttccaagttgactccttttagtgcattgctgtcaggaccctgaattgtaaagacctagcatggtggctgggaggccgttactgctgttcccaaggggtcaggtgacgcccacgtagggagacctggcggtgttggtttttcaaagatccgtatcatccgtgactcagtgttgggtgactcagcttgcagaggtcccacacaggagctcctgttactgctctgacgtcgtgttacatgtctcactgggcatgcccgggttttataacttgtctacatggtcatccaagatgcaattataaaccctgaaggaaaagggcgtcttggccatgcttattaacagtgaggtcagatgcggcatgccctgtgggttcactgcagcgggtgtgtgaagctcagggcggtctccaaagatgcctccctgacacgggttctgccaggaagccacgggcctcttgggttgggcagtcttgtagctttgctctgtctgtctgggttgagaacaaatacccatagatcctcctgtttcccacaggacttctgaacctccctgtaggcctttgcctagacaaacagcactccattctgcttgcgtgtaaactgtaaactgtaattgggaagcattcagggtggggatattgcatcttttatgagatctgcccaggcagtgtttgaattccctagttcccaccatgcagcataaacagctgcctttttttttcttttgtgtgtgtgtgtgtgtgtgtgtgtgtgtgtgtgtgtgagccagggttcagaagcagcggctaagtcattctttcctaggctgagaaaggttttttttaaaaaatacggacatgaacacgacagaaggttttttttaatgaaaaaccctcgcagctgggaatggaactcagtggttgaacacttacctagcatgtaggaccctacgtttagcccccagtactacagagggggaaagaaagaccttcattcatctgggtcaaccatgggtctttgtgtgggtctttgggatgtccagtgttctaagacagagcaaagaagcgaagccatccctgcgctgcctgcagagactgttgttgatgagggcagagtctgctccacggatacatggtacactttgaagatttggttaaccattgggatcttggcaaagttcatagctattcttcctgtaatagtggttccctgatggtgactgaacaaaagaattggttgagcataactgcagcccagggctcatgcattcacacagcgtcagggtggggaaataatgagaagtccatagaattggtcccattggcttttttactgttgctgttcattatagcgtgttctttcccactgcaacattctatcctaatgttgcaaacgattggggactagtttgcctatcctggatcctagcatgttcctctctctctctctctctctctctctctctctctctctctctctctctctaatgtgagaaacactccctccttacatttatcagtgagaccacaaagaaagctatgaaaaaaaaaaaaaaaacaggcaacaatgattcctttctcaggactgctgtccactgtctcatcctttttactgtcatctttaaaactaggaagctgtacagagctctggcaagacagaaggaacggtgactagctggtgacttccttttttgcaccaaactaatgacaagatgatactcattgtagataatgactaaaaaccatctcaggctcttcgctagctaggcacagtggctggtgcctctgtgaccagcctgatatcctggtcatcagtcaagtgaaagagcgctcagcatttgccactttaagacatgaggccttcccagagcccctccaccagggagaggcaggactcacaactaaacgaaaatgtgagcaaactcccgtgtgaaaactgtgtgtgaaaactgtgagcaaaaactgtaaaggaaagagaaaggatttgagtattacaagttttgcttttagggctgggcagtggtggcgcacgcctttaaccccagcactcaggaggcagaggcaggcaggtggatctatgatttcgaggccagcttgccacaacagccagggttacctggctttaaaaaaaaaaaaaaaaaaaaaaaaaaatatatatatatatatatatatgttacatatatatgtgaattggttctttcttcccaccatgccagggttacctggcatatatatatataattacattgcatatatatgtgaatcggttctttcttcccaccatgtaggtcacaggggacaaagtagggtcatcagatggggaagtgctgttacctgctgggctattgctgaacttgctcactgctgccatctagctatgctctttaatatctgaatataaaataacaaaactgttgcatgacagagttgggaaaaatacttggaacatgtgtgataggccaacagttaatgtctttagcatatatgataacatgtatgatggaccaacagttgatgtttttagcatgcattcaggaaagaagcaagggaggggggtgtaccagccagcttataaagtgactcagaactcagacagcctatttacttaacgttaagagtaagtgagctggggctggagagatggctcaggggttaagagcactggctgctcttccataggtcctgagttcaaatcccaacaagcacatggtggcttacaaccatctgtagtgggatctgatgccctcttctggtgtgtctgaagacagctacagtttactcatattaaataaataagtcttttaaaaatggggtcttcttccttcttgacctggcctagtcaggataatgagcagcagtgacgggtgtcagagagaaggcctcatgtttaatttggggaatccctgcaatggcggtcagcaggaaagtataggaagctgtaaatccttctgggaaatgaaagcgaacggagatgtctgcagggcggggctgggatgcctatatcagagtcctcgagatggccagcttggtgttcacataggggccgctgagatggctcagtgagtaaaggtgcttgctgccaagtctgggaaactgagtctgatctcctgccccacggggtagaggacgagggctgactcctgaaattttacctacctgcatgcatgcacatgcatacacatacatactaacacactcatatgtacacacacacacacgatagttgaaaatatatattaaataagaggttttttaaaaaaatgttcacgtggatgaaggaaatactcattatttttgtcttaaaaagaataagttctctctgggatgtgaagttataataaaatgtattctggtctctcaaggaacctagctgtagatttctgaaaacacataagcttcacagtaattctttctattttactgttttcctagttgcgtcttagtatcgttacttgcagatggaaaggagaaaaaattttctttccagaaatacacgaaaacattcgctttatgcatttatgtgtataaacacttataaacacacacgcacacatttgtttgctttccaaatttctctcatatcccagttatgaatgaaactttattaaatatgaaaagccacggggctgatggcatggctcagcaggtaaaggtgattgctgccaagtctgatgacctgagttcaagtcccagacctcacagaatggaaaggggagagaattgtctccttctctgacttccacacatgcatccacacatccacacatgcatccacacagccacacatccacacatcaacatatgcatccacacatgcatccacatatgcatccacacatgcatccacacatccacacatgcatccacacagccacacagccacacatgcatccacacatgcatccacacatccacacatgcatccacacatccacacatgcatccacacatgcatccacacatgcatccacacatccacacatccatacatccacacatccacacatccacacaataggtaagtgtaaatgtgacaagctcgggctatattctgtcatcaaacacgaatgtgtgacgcgtgccttatgctctgtagagctgcaatgggccttgacatcatagtctaatagttgaagccagaatgagaaataaacaaggaaacacacaaacgaagctccagataggctctgagagtttaagctcaccatggagaccaagggcgagagccactggttgatttccagtgtccgaggcctgagttcccgactggctatattcaccagcgacgaggtcttggcagatgacagtctttctgaccccagtcacctgtcatcatatttataggtcacctgccatacctgtgtatctaaagttagaatagaaatctataaaatgtgactacaggtaaagacaccaactggatagggaagccatctcttccttcttggcataaatacaggcagactagttcctggcttgagaacaggacaagggccatcctgggcctcagcacaagctcactcctgtgatacaaactcacccctgtggtcaccacatttccccattcatgaagatagaacccttgtgacctacctagtgttttcttaaagggccctaccacctcttgacactcctgctccgggggtccagtttccagccagtgaacgctggaggacaagtccaagctctcacacttacatcagctactttgcttgttgtgtgaccaaatgcttgacagaaagcccctagtggggaaaagcgtttatttggcttgcagtttaggggactacatccatcatggtgggaaaggcatggtgacaggaggtaggggacactggtcacatgatgtcagaagtcaggaagtagagagaggtgagtgctatgcagagcttgcttgcttctttttactctgcccaggagatgctgctacctggtacactcgaggtgagtccttccctcctcagttacatttttctggaaataccctcacaggcacaccctgaggtgggtttccatggtgagtctaaagccaatcaagttgatgaatgcaaaccaacccagtattcttggttttgttccccaagtctgcagaattgaagttgtggattatggtccagtagctagaagtcctgtcccacctgtccctgctccttcctagggagtgtttgaccagtgtggaagagcaaacgggattgctatggtcatctgcttgggctgatacagcgttagagtgggcttgagtctggaccacgggcagttctaccagcctgagcacagctgagcttactctgcatcctgcctaggccaaggcttgactcaagactaaggcctggcctgtcttttgaatcggagcccagagtgcttagagagtaaggaaggccccttcaaaacaggagaaaatactgatattcttatggggggagatcaagagccttgtagcagactgcgacttaagagcggtatttcaagtatgtgtgtcagagacagtgacgcggacaagccatgctgttggtggctgtgtgcacacacacctcacaacgcactgtgtgtttagacaaggctgttaaaattctgtttgcttttaaaatctgtgggtgctaccaacgtgtcaggaggaagcgctgtactggatggtaggtgttagaaagggagaggaaaggcgatgtaaatttggatttttttttttttcgattcattttgcaaactttaacccgcccccttctctctgtgtgggtgactcgtgcattataatgtctaagtctttacatagttactgtggcatggctttcccctcttcaataatgtttcttgttacaattgttgacacgtgtaagtactttattttttatttttaagtatatgctttttcattctggaatgcttacatttaaggcatacaatctcatactattgctgggtacttaacttggctgcaggttctagcatgttaaacggtgctgccaaaacatctttgacgaggtcatgtgaggagagcagctcagatatgcacgcacagtggctcagaatggagtctgtacccttcccgtctggcttcctttcattttgttttatctgtatgagtgttttgtcagcatgtgtgtctgtgcagcgcttgcattcagtacccaaggaggccagaagagggcagtgaatcccctgggactggagttccagttgtgatctgctctgagggtgctgggaatcaaaccagggtcctctagaagagcagtcagtgctcttaacctctgagctcactccagtctcgggtttcctttcaaatggcctcttgtgatgattctctcagcagaggtttataagcgatgcctactcctacagctcaacaatatttgatgttgccagaatctcactttttggcagccccgtgattgaagtgtcagttctagtctcttgttgacaggttttgaagcgtcttactctgaagttttgacgcactgcaaggcagtactgaaatcccatccagcctcccgtcagagagaaacacgccaccaatagctcgcagttggttatgtttgaatgtgcaaatatatggaggatgaagcgattaaactgactcccatctttcaacagatatttattaagcactttatactaggcactaggattacaaagataatgagattgccatctctgacatccgggtgcactcattccagagctggaaatagtatataagccagtagtgcctgcagatgctgtgggagcgaatgttctagtaaccagggggaaggaagtataatgtaattctcttcattgtctgataatcaatgtgaagaaagcgcatgccaccttgaatgtttattaaacatgtcataattacattctgtcccactccatgatagtgtaggtcatggtagaagccgcaggagctgagattggcaagggttagtgaaagagaagttgcctttgtcctcctgcaggagcacagatgaggtggatctgtgaactggtgaatggcaacatcttggttactttttctattgtcctgatcaagtaccctggccaaagcaggtcgaggaaggaaggggtccttttggctcacaattccggaggacagggcaagcatagcagggagcaagaggcccctgaccatactgtgtgagcagtcaggaaggagagagcgatgagcggttctgcttagctcattttctctttttgattcagtccaggacggatgccagcccatggaatgcccctgcccacatgcaaagtcttccctatagataacttaatccagatcatccctcaaaggcatgcccagatgtttgctgcctaggagattctagagcctgtcacactgactgacagtcagcattagccattgtcacctcctccaccaccaccaatgagcagtttcccagcagtcgacagtgcggggaggaagcgggcctaagaaaatgtactcagggttctctctacttggaaactaaacccagatgggagacaagacaattcgtattaaataacatttggatacaatttctaaagaagaaaaggaaaccaactttgatattgcttttgtacagcctgctaacaatggagaaggaactttaatcccccgagaaatgtcaaagcagcagcagtatggaatcgtgaacttatccaaatattcggcagtagtttaggaacaaaactgaaagtgcaaaccagttgtgtgtggttatccctgcctagagtttcagctgctgagcaggctaggttaggaggctcactgggagttgtacagttgagagcaacaggggcagcaaagcaagccccatctacacaaactgcatttgctgcactctcatttatagctgtactgtaaattttgagggggggaggactaagaggttattactaatacaccagtagagggcttcccatatctcaactcttaagaccacttgctgctcttgcagaggacccaagttcagttcccagaactcacacagtggctcacaactgtctgtgacttaagttccgggggaatagagtgccctcttctggcggctgagggaactgcatgtgttgtatacatacacatatacatgcaagctaaacattgatacacgttaatataaaaccacatctctctttttataaaaacatacatctctcaacacaaatcaccctttttattttatttttaaatatctgtttgggctcagcagttaaggtactttctgctttaagaactacctgcatcaggtggctcacagctgcatgtaacttcagccccggggaatctgacaccttcttctggcttctgtgattacccacgcatgcacatgaaaccaataagtcttaaatgtttgttttgttttctaggtcaagaagtcgttttcaagtgcctcggggaaggaattctcgagaaagcctttcagggatacaatgcttgtatttttgcatatggccagacaggtaagatgttgcttttattgaagctgatgaaatgaaacaagtgtttgaaaggatgtagttcaggggacaaagggcttgcctaacgtgtgcaaaatcctggatttaacccttagcgcttaaattagaagactatataaataattgtcccttctctgttttgttttgtttgtttctttgtggtactgaggattgaacccaggacctctggtggaacaagcatgagctacatccatttcataaaaatatatatatatatatataatttcctaacatttaaaaggctggggaagtttgagaaatgcagaaaaattctcctgacatcttgcaatcaaaactatcccacatttcgaaaatacatcagttcagtaattgcctaatctctgtgttaatgagcacatctagttccgtgctattaagcatcactttcctaaattatagttttaacctgtgtttgaactggaaaagaaatcatcagcttcatagtataaatgttttggcagaatcaatacaatatttttagagtctcccctgcccccccaccccctgccccccaccatcatttgggttccaaaatgatgatagattctagaccgaaacaggtagaacaaaacaggcaaatcgaaaatacagttggggcccagctattacggctctgagctgttgttcttttggagtagaaataaataatgattcctaataatactgccaccgtctgtgtcacatggctgtgagaacccaggaagagaatatgggtaatttagcatatggtatgtccagctatgactggatgctgtagcgatgctgggattttactgtatatgcaatgtgtgtcccagcattagggtttcgttgctgtgaacagataccatgaccaaggcaactcttgtaaaggacaacatttaattggggctggcttacaggttcagaggttcagtccattattatcatgacagaaggatggcagcatccaggcaggctacctcttgttctaaagacaaataggagaagactggctcccacttggttaggagaaaggtctaagagcccaccccccacagtgatacatgtccttcaagaccacacctactccagcaaggccacaccttccaatagtgccaccccataggtcaagcatattcaaaccaccacacctagtaaaactgacgaaattgcttatcttgtaaaaggctcgccgtgtaggcatgtagacttgacttttttagtcaccagaatccatatggagaaactggtgtggtggcatactttggaggcagagccaggcagctccctgggggtcaccagccagtcagtctcatgtacctcacaagctccagggccggagagaccctgcctcaaataatatggatggtagaaaggagtgacagccgaagctggcctctgctctccacacacacaggcacacatgcacacattcatatgcttgcacagctctttccatactacataatggatgggtgggattttacgtccattgctttcctgaggtacattcttagtgattgtgtctctagacactcatgtgtacacaatggaccatcccaaccttacagagatagacccaggaggggttctagcgtggagagtaactgtgttgttcagggttcggggtttgaggtccaaatgcaccccacgtgtcctgtgtgtccttggccgtccagcaggagcatcttgtgccgctgaagcatcccgcttgcattctctcctgacctcacctcacgcccctctcttgctcttttccaggttctggaaagtccttttccatgatgggccacgcagagcagctgggccttatcccaaggctctgctgtgctctgtttcaaaggatcgccctggagcaaaatgagtcacagaccttcaaagtcgaggtatcgtatatggagatctataacgagaaggtccgggacctcttggaccccaaagggtgagtgagtgctttgaagtaaagtgtaaaattaggaagagtcgtttcattttctttttaaaaagatttatttattttatatatttgaatacacagtcgctctcttcagacacaccagaagagggcgccagataccattacagatggttgtgagccaccatgtggttgctgggaattgaactcaggacctctggaaaagcagtcagtgctcttaacagctgagccatctctccagcctggaagatcattttaaatgattttttttttttttttttttgagacagggtttctctgtatagccctggctgtcctggaactcactctgtagaccaggctggcctcaaactcagaaatctgcctgcctctgccttccaagtactgggattaaaggcatgagccaccactgcctggctttaaatgatcttaaaattaaaattgccaggttgtctacatatttgggccattggtcactgttccgatgttggttcgtgtactaaaaaggagacgcctcccaaagcctttcaatgtgtcagatgtgtgccttggaaagttactcatgacagcacgggaaaagatgttcttactgctgccattgttttttgttatcagggacaattcattaaaacgaagttataggagctgagagattgctcagtggttaaaatgaagttatagttgctaagagatggctccgtggttaagaacgctgtctgctcttccagaagacccaggtttcattcccagcacctacaaggtggctaacaatcatctatacttctgattccgagggatctgtcgccctcttctgtcatctgtgggtactgcacacatgtggtgcatagacatgggttcagtcaaaatacccatacacataagataagataaataataattgtagaattgaatgatgtatgcctctaatcccagcactcagagaaggctcaccacctgtttgaagctgtcctaggctgtagaatgggttctaggccagagttatgtagtgcaaccctgtctcaaagaatcagaaagttgtgctagtacctgcacattggtccttgcgtttattttggaaaacaacaactccaaattggaggtgaagtggcaggagggttgtggccaccatcccttccctggttatgtgttaggagcacgcaaggaactctttaaggttctttactggcttaagccccactcccattctgaatgattcaggagacaggtgaatcccagacatctgtctttcataggtgatgataggtggtgatgtcacacacctttcatcccagcacttgggaggcagaggcaggctgatctctgagtttgagtccagcctggatagccagggctacacagagaaaccctgtcttgaaaaatgtcaacaaatgaaacaaacaaaccaggtgagtttgagccataaattcatttttccagtcaaactttgcattgatttaaaactaactagatagttggaaaatagtatagaaagcaggtgaagtataagaaatgaagctgacctttaaccctgtcactcaagagtccccttgggtaacacttgggtatgtctccctgctgtgtttcagtcatgcagtgtgtggacgtgttcacatcttcaagctatttaataaataaccgttcgatatccagaattccctgtgtaccctgatgtacactttggtgttcattaaatactttccaatagtttttagcagctgtgggatgtgtaacatttctgcccacttcccagcactgtggtctccaatgaaagcaagagttttaacaataactttatagacctcaagactgcctctccccaagtcattgaaacatttgtgtttactttaaagaattattaactgtttatgcagaagaactcttgtcaggtatgaagagcagcaaaatcaacccctgcctgcacacccacttgtcttagcaggtggaatctagccaataatttttaatctttctctatgatccctggactcttattcccttccctattggtcctggagacaaatactactagaaattttaaacttaccatcctcttcctcttctgtagcattcatccatgattttgtacaattttttttattattatatgtaggtacactgtagctgtcttcaggcactccagaagagggcgtcagatctcgttacagatggttgtgagccaccatgtggttgctgggatttgaactccggtcctttggaagagcagtcgggtgctcttacccactgagccatctcaccagcccgattttgtacaatttttaaccttgtataaacagcaccagcaatatactcatctcatgcatttttatataggggttaataatgtgatagcgttcactattgtttaacatctcgtcgaattatcaaacaccattctttcccttcacacataggcttcatgtctcatctcctccatagagtgctgctctagatagtgccgctctgggcgcacatgcgcgggcttcttgggcagtaggtacaggagtttctagagtattcttctggggataggactgtgagtcacaggatatggaggcacctgtttcattaactagagtgtccacggtatgcaagaattccggatatcagcataaaggcctgggtttaatttctgcagtgctgtcgagcgatacagactctggttggtaagagtgagcccactgctgggttgtgtgctcgacagtagctatcttgaagatcagactggtcggtccggagtccagcagttactatagttacattgccttctcgttctcaaacgtaagattaaacgggacacctgaaaaatgcttctgtggcgtcgccaagtgtgtcagagacatcgggattacccacatctgagagacgccaggcattaactctttgaaaaacgataaaatgccacttgccatgaaaaagatggtacccgcagtacaggaaatacctactagcttcaagttttaaacctcatgggtctgattaactatcaaatgggtctcaaatcagagataaccatttaaaattcacaagatcccctaaaggattggtgaaatggggcgctgctggccgaaatgacctgaatttgatgccagggactcatgtggttaaaggaaagaacccacttccttctgacctccatatgtgnnnnnnnnnnnnnnnnnnnncacacacacacagatacacacacacagagacagaggcagaaagacagaggcacatacacactcaagcacacagacactcacatagacacacacacacacacatacacacacacacacacacacatgcacacgcacacacacacacacacacacacacacacacacgcatgcacaaattaactatagccccaatattgtcatcagcagagctaatccaagtatcagacatcagtggctacaactgtgttatcatctgactttctatataaaattgccagcgtgggagcaacataaatcagtgaaacttggaaaaataaattaaagttaaaaatattttattattgttcagtatttgctcaaaaactttaaaggagaggggggaaaatgaagtctggctggcggtgaggatatgggaggagctggggagcagaaggagtgtgatcaaatgccttgtttggaattcccaataaataaaaagagtatcaaaaagaattgaaattattctttatgaagaatgtgtaggtttatccatcttccaccacgggagtctggccagggttgtgtgctggtttcccttatccttgggatgagagagagacattttaaaaatagtatcactgtttgaaatcagagtctaaggcatttctcatgcagagtgctgctttgctataaagtggccattaaagcaccttctaatcactaaaagacccttttgagtttgtaatctgaatgtctaagtgcttgggagaaaggagaatcccccaagtgtggtaagattcacccacttgattcttcttcctcccctaggagcaggcagtctctgaaagtccgagagcataaggtcctggggccgtatgtcgatggtctgtctcagctggctgtcaccagctttgaggtaagagtcttttttttttttttttaacctcatgaaagaaaaagctccacatcagtaaatggcagtgagcatgttttcatatggatatgggatagcatatcgatgcccctcatcacacatacagaccagtacaccaaggaatggtgtccttcagtcacacttcaggctgccttgtggtgaggagttcacagtgaggccagaaggtctggcactctcaggttgctgagtgttacccctttgccactactgaaatgcctcccccaggtggcaagcaatgtccttccaaacagtcaggtcgtctgctcagcatctggcagttaactaacccccttcttagccctgccttgacttctaaggccctttggtctgctggctcccctctctttctgattcactgctttatccaaggactctgatctgttttctccccgttctcgacttttatacccagacatgatgtcctgctgtcatttctacattcattaccttggatgttttaacatagatttctagttcttttgctgaagaataagatgaatgagagaataaataaatgaacagacccctgtatttacttataatgtataagagattatcttatgattacccatttatcatctgagacttggtaaagctaaaactaaggtgagggtcagcatacagctatttaaatgaaaatacgctgtatttctcaagttgggtttggacttccccatcagtttaaatgcactgccattctgatgtgaaggagcctttttgaatcaaaggtgctcagtcatcactttaactaagcctgtttcccagctaatggtgatggaactcagtccctgctgccttgtcacttctgaataacagggaggcaactccattctcacctgagagccatggggaatcttagatgagctccatgaacttatacatcttggtgtgccgagagggttctttcataacgcttgttcagcaaacattttgtaggagcccagcagtaccacgtgcatgaagacacaaagataaaggagaacgctcccttctcttgcagagccagagctgcttgaagcaggaggcatatagcaggggacaggcagccgcaccagggtgacaggcagaagatagaattaaatggcatgatgactatcccacagggcaaggagagctgagagagagagagagagagagagagagagagagagagagagagagagagagagaatgagaattatctccaggtgggaaggagaacccagccatgctttgtgggaaagcggctagctatgtctatggaagggtatgaccaaggcatggaaagatcatagtggacacattcttggggtgtgtagggggtgcaccctcgtgtttgctcataacacttttttggtctttgcctctaggacattgagtcactgatgtctgagggaaataagtctcgaacggtagcagcgaccaacatgaatgaggagagcagccgttcccatgcggtcttcaacatcatcatcacacagacgctgtatgacctacagtctggggtaagggagctcggagtggaaacaggaagtgtgtcacagctggattcagaggctaaggaccaggctggcctcgaactcctcccaaaagtctgggattaaaggcttgtgccaccaccacccacctttctactggcatttttcagttggatttttttagggcttgggatatagttctgttgatagagtgcttgcctagcatgcatgaagccctgggtttggttctccactgctgcataaaacctagaggcaggaagattaggagttcaaggccatcctctacttcttgagactgtctggggaggaaaaatggatgttgtgtgcacacatcctaactatcatgatgatgtctccacacaacttttaaatatgtgttctttttaactagtatttccctaaaaagcaaccaaatctacttcatggctaccgtgagatgttacaaaagaaactgcaacattctatctaaaatccgtatctcaaaaaagggcagaatctggcccaaatgcaaagggcctccacgtgctggtgttccctccaaggtccatagaacctccagcttctgtcagtctggaagtctagccttctgactgtcctggaaattcttctgataaccctgaatgtccggaaaaccttctgcccagctgcagagcagaacgttcgatttctttaccctcttaaattttgccttagggactcagaagatggcttagtgggtaaagctcatgacacacaaacacggggagctgagtttggatccccgtgacccatgttaagtccaatgtgacagagcacttctgtaaccccaggactcccataatgaatgagaggagagatctgagacaggagaatgcccagaagtgtctgggccagcctgccgggatcactgcagtgaaccctgcatggagaccatgttcaaccacctgggttattctttggtcctcacacacataagcatggacatgcatatacccgtacagcgcacatacatacaaagatctaaaatttgattactaggaaacaattggctggcagaaataactgtgagccggttaagatgccaagtgctttgtggtggagtggatcacagtatcagtatccatgtgtctttcttcacgtgtgctgtttctctcttctctcctacaattagaactccggggagaaggtcagcaaggtgagcctggtagacctggcggggagcgagagagtgtcgaagactggagctgcgggtgagcggctgaaagaaggcagcaacattaacaagtaaggtgaccggagcaatccaggcaacttaagttcctttgttttgcaatggagagtggggagtgggtgcctccttgcattataaggatccagtgattctgacacaaggttaaagtgtttgtaactttgtaacttcagtaagtctgatgggagacaaaaatggcaggctgcaattgtttctgaacatgacatttattgaagtaaagtcctgtggtatagccctgcccttctgcaagtggtaaattgcctatgtggcttgtgtggacaggtgatccccagctcagggtagatgtaatagaagttatttgtattgtcactttgattataactggctaatgtgtctgaaggaagggaaaacaatatgtacgctcatagctgaaaacccatctcagcggaaagcaggagtggctgaggctgtgggaactggctgtctttccgatgggtggatcaggaagcaaagagtgggccagaggcagaactcaaacctcaaaatgtaagccccagggatcagccccacccttccatcccaactaagctccacagcctcctaccacagcaccaccagcagaagaccaaatgtccaattcaagcacattcgatccctgattagtggttcaacttggtactttttagactttgactttgagtcctttcctgggacaagctgtagtctgtttctatacctccaggctaagtagatgatggcaaaccatggcccactggacagatccatccagcactccacagtgtgccgtgttgctaagacaggatgctggctagagagggcaggtgtgttaaccgcattcttgactcagtgtttcctactgagggtagctttagctggagctgaccccattgtaagtcagggagtgcctacagtacagactttggtaaacttcaagccacagttatagagcagatctatcaacagaaaagcctgccttaaattcctttgtaaagctgatgctattgatatatgcgtaatgtagatgaggaggctcactgtttgtctggagtgtgtgtgtgtgtgtgtgtgttgtgtctgtctgtctgtctgtctgtctgtctgtctgtattcatgcatgttcagggaccaggctgcccagagttcatcctacatccaccacttactagatgtgtgtattgtgggcaagtgacatagtcactctgcctcagttttcctgtctgtagaggggaggttgaacagtagtggcttcctcaggctgcagaagattaaatgccaccgtgcatttagagcaatgcctggtgtgtggtttgcacggaataaatactaattatgtcatgactatttctctaatcagcataattgctatcattattccgagttctacagaaaagcactcagagttgttgtccctttcggttgatctgttgtaatttgaggtcttgtcttcagcagtacgtgatgatgagaaatattctcaggagcatgcatgtgcagcttgatgttgtaacataatattggcacagaatgctcttagcatatgaaagctcagagaggagatgtgagacatcacccgctttatcagacggacacagctgcacacactggcagtctctcctttctaggggattcccccttccccgtcctcctcctcctcctcaggctttcataagtaggtgctttgttgtgcttcatgacaaggctttgaagagggtcgggatcgaagaaggaagaatggctctgccggtctgcttccctggaacccagaagagggtgggaaagcagagactggagcacaggatggggtggagaggaccaaagtaaagagcatccctttgttaggaatgcatttcctgatgctggtacctcagccttccctctgcaaaggcttgtggggcaacccaagaatatatgagaatttagagcatatatatggccttgttgtaactgatgctggcttcctttttgtgtctgtctgtctgtctgagttttcccttatgcctagaaaggttctgagttttctctggggatctgcccatcagattgattgattgattgattgattgattgattgatgtgtgcatgtttacaggtggcctggaaggccagaagagggtcccctagagtagaggttatatgcagttgtgagctgctgtgtatatgctgggaaattaaccctagttctctagtagactgtctggtgtcctaacttctgggttgtctcaccagccctaacctgccatcagcattgtaagatggattttgtatcttcatctggccaatgagaaaaccaagacagacagtggtcaggtagtagagctaggactctaagtgcagtccctgggtctgactgctggaacgctccaggggctgtatgctgtttgctgggcatagtctgattctttggtctaacatgaatattattgatgcttcctcgtatttagattctaagttatttagaaatcctgactggtctgtactggattgcctccaggctatgtggtaacatagtctaggtcccttagcaacttctgcacaatgacttatgagttctcctcacaccctgttcttttcctaacctgcaaactaaggtccctgacaaatggtatgtgtgtgccatcctactgctttgggaggcgggacctctgtttttggtgttctctgtagctttcacgtgacttgtcttgtgtaggacacagagtgggtcattttgtgtttgctgatgggacaggtggtttaaatactagtaagctgatgcttggaaaagtcacataagtgaaaacccatcagatgtgaatcacgagtggacttggtgccgagcccaaacaataccaaatagctccacactgtaagttccaagtctggtgtacacattacaaggcaaaagaattctgtaggtataatttaagttgggtctctaagacggaaagattacccaagtagacccaatctgtcgaaggctccttcaaaggaaagagagatgcgggtgagcctgagacacagcaaggggagtgagggacctgacttgttttctgccagaagacagaggagaggactgtgagtcaggagtgagggtgacctatggaaggtaggagacaacataagtgtggaccccacccacccagttctctagaccccacccacccagttccctaggccccacccacccaggaaatgtagagccacctatgagacctctggctttggtcaggtagtatgcagtctgagtttctgaccttcagagctttaagattatagagccgtgtggatttaagccacggcatctgtgataatatatgacaccaggattgcgacccctgagagaacttctggatcaggagaggtagagcagcgccattctggaagcaggaggcacaggaagtctcctgaggaagcaaaaatcaagatcactccacactcacgagtcagcctccagactgttgctccagaccaggagttctggacctgtgggtctcgacccctttgggggattgtatatcagatgtcctgcctatcaagatatttgcattacgatttgtaagagtagcaaaattacagtcatgaagtagcaatgggataatcttatggttagggtcagcacagcatgaggtattaaagggttgccgcattagaaaggtcgagaaccactgcaccagactgtttctacattgatttttgtttattcccatcatgggtattttcctatttattagggaaactgtctgagatccctccaggaggtcctatagtatatattacaagtacaatacaaaattttgaaagatgccaaatttcaaggcacgtgtgcacgcagggatcgcagataagaggtacaggcttgaactttgcagagctgattagaacccagggcggagtgagttgcagaccctggccttgggaggcagagcagaaagagctttggagctgatgtgttggtacataggttgccatagaaacatgcggagaatggtgagaacccagcagaggtgattggcagctggagaggtggagtcaaaatgggcttcccagaagagaccctgaaatttcctgcttatccaatccggccatgtgaccttccctcagtttcctcctctgtaatgtgtgactaaggaagctgtcagtcaggtacccttaccgtgaagattcagccagcggcttcttgtaaggtgcacgggacagcggctggcagccaggacgctgagcgtgtgctaaccatgttaataaggtgaaactgtttgtagtcccacaaatggctttctaagcctcgtgaccagccagatgctgaagctaaagaaattgctgatgtatttcgtcaatgtgctctcagcctctcatccccgcttctttatacaaaacattaataatcctcttgagcagacctgtcagcagtttcgcacgacctcagtgcctgtttaatgggccgcagatttaggggtttcgtctctcccaaagctcttaagtgctttaaagcatgggacactcctttcatttgaagagcaaaagcaccaaggcaccatgtggctgcagctacccaggaatgtgctggatttaggttctctgcagacattctccctgtggaggaggggtgagaaattgcccaccagaatgccaggctgcgactccacctgtctggtgaaagtggaatggcttctccattccctgccactgcactctggctgcctcagtttttctacacattgatttagtccatggagtgcccttcccaaggctcccagacaaggacccctgttactcaggaggctgggattaaaaaacagcatcaaggcttatctaggctacagagtgagttcagggctagcctggacaacgtaggccctgtctttgaagaagaaaagaaagatggctgtgggtctatctcagtgttaggatactagcccagcatgttcagtcctcagttctgcaaagaaagaaagaaagaaagaaagaaagaaagaaagagagagagagagagagagaggaaggaaggaaggaaggaaggaaggaaggaaggaaggaagagaaggaaggaagaaaaaaaaagaaaaagaaaaagaaagaaagaaagaaagaaagaaagaaagagagaactatttgtccatactatttctaaaactgggttccattcaggaaatactcaaatatatcacttctaggattatgtcgtccaactttttataacttacaagtctaataacagtctttcattttcccctcttggatactctacctggttcacgctcattttgtttcgggacagcctgggccctaggccagctgcccaggagtcagtggcttttcctgactgcctatcccctacctgactccacagaacagctgttgtgcagtctgcgctgggtttcttggacacttctccagtagttttaagaggcttggctcccagcccgtcgctgtcagtttccaaagtccagagtgtgaatgacacccggcatcagggcaggtgtgagcggtgcctcttctcaatcctctaggagccccacccacaggcttcctgggaaaacgggtcaacccttcaagagcccccatcttcagggtccttgtttctttgatcctactttttgaccctccattgaacttacgctccttagcagttcccaggccaggtgcatcatggatgtttcgagaagttccttttcctttctgcttgttttgaacctgtctaagaaaaccccatgaattcgcttttcgtttaacaccatttccaaggtgtaacataaatagaaaataaatgcaagacggataccaaggaataaataaccagaagaaatatccattaaaacgatgtataacataaagacattcactaagaatgtactccggtatcaaacatcaaatttcaacaatgccgaaatctccgtgtgagggaagagttctggtgattaaagtattaaaatatagaacaaaggaaacgggaaaacactgaattacaacttaaattcttcccctcgtccatcgcatttactacagcaacctttattctggttttgagctttactagcttgttttatctaaaaaaaaaaatttttttttttaatttctgtctgtgactgtgtctgtgtgcatgtgactgactgtgtctttgtctctgtgactgcgcctgtctatgtctgcgcacgttccttagatcgcagggacccaaggaggccagaagcgggcttggtggtaagtcacaggatctgggacattggaactctaactcaggactctttgcaggagcagcaagcgcctttagccactgatggatctctctagcccccatttattttctttttatcccaactaatccattattatgtgttaagtggcttttaaatttttgctacttttaaataccaaagttcgggggagaccatgggtggagctaaagtagaacagcccacgaggcccttcgctcatccgaaacacaatgaaaacaaagtggagctgctttatgaatgtctccttctggcactttcttcctctgacgtcagcacctcccctttagcccctccctcttccccatcgtactccaaagattaggaatttcctagcagcagaggggaaagagagaataaaaaggagttctggaatcactgttcaccctccaacgctgagcaaccattgctgccccgctggagactcctgcagcagcgcccccatgcccccacccacgcccccgctgccttaggctgccagctccagaaggcgctcatttaaacccacatacaagttacacaccaaaacactgtcggtgtttctccgaaggcagattgtcaaatgtgcgtggttgttgcatcctgctagactccacccttcagcaggttggggttgggcctgcatttctgaatggtttccaatgatggggttcgatggtttaggtctcaggactgcgctttgttaatgaggagcctagacatccttgggcactgtccactgcaagttctcagaatgtagtgtgtgtgaccctgagagacctttgtctgctttagtaggtctgaagcggcttctgtggttttcttagacgcccttgggtgtttacccatgctccttcgagtggcagagtttgaaagtgaagtctggtgctatccttggtttgtacatgtcttcgaatttgtgaaactgtgttaaccccacactgagtcatgtcaccagcattaagtgctaagttataggggttgttctgcctggtgtaagagcagaggcctgggtggactcaacttgacctgaagattaagtaatatttggagtggattagtgctttccagtatgatttttataattgcttgttttggggttctaaaatacacattttataagtgctgcaattaagcataatattttcttatagaaatcctaaatttgttattttatgctaataggttcctttttctttgttcttggcttctgggaaaattattggagatttaactgacggttgatttaacggttctgcatattttttcttgttttctagaagattgttgttttatgaaaacaaacattccacaaaagttaattttcactcctcttgtggcagatcccttacaaccttgggattggttatatcgtcactggctgaccaggctgctggcaaaggcaaaaacaaattcgtgccttatcgagattcggtccttacttggcttcttaaggtaatttgctaacctaggattcatatttatctgaccttgccgtttccagtgtgatagctgtttaagaagtgtgcacggtaatcaagcacacagtactgcctaaccaagcacacagtactgcctaaccaggcacacagtgctgcctaaccaggcacacagtactgcctaaccaggcacacagtactacctaaccaggcacacagtgctgccttaccaggcacacagtgctgcctaaccaggcacacagtactgcctaaccaggcacacagtactgccatcctaattcttagtgatgcacaacaaagatattttgtagggtgtgtggagatggctctgcaggtaagatcgattgcttgagtaagcttgagtcctgagttccagtcaccagcatccatgtaaacagccagacgtggagatggtggagtttgccaaacacccagtctagctgagacagctggctttcagttcagctagacacactatagaggaattaaaagtgacagagaaagacatccaatagctttctttacctcttcatgtgcatacctatacacacacacacacatacacacctccctgcacactcatttacatgtgccacacaacagcaaacagacacaaattaatgctactttatatcattttattctgccacaatgtcctttggcaggtattatttattgctataaatacagatagaccacatttcatcttttttataaaatgatgtgcaaaatattaacacacgttcattatgcgttttcttctcgaagaacaaagtcaaatgtggctatttcctgcttttattgggtgctgacgtgaagtggtgttcaacaaggtgctgctatttgccattctttataggacaatttaggagggaacagccagacctctatgatagcgaccatcagcccagcagcagacaactatgaggagacactgtccacgctaagatatgcagatcgagccaagaggattgtgaaccacgctgtggtgaatgaggaccccaatgccaaggtcatccgagagcttcgagaggaagtggagaaactgagggagcagctctcgaaggctgaggtaatctctgtctgccatgccctgttcctgatgtcccttcactttggcgtctgatgggtaagggtgtgctgtctggcggccctgggtcctagccatgtgattcagtattgcagtgtgtagcatcagctgtgggccaaaaggcattgtaaagtaactgcaacggataccgactgctgccctggcaacctgcagacaggaggaagaggaggtcattcctgtcactgcctaattgtttgctttagtcagtcatgtggcccttgaacttgcaaagggaaatcctaagaacagtgtgtggtgggctttttgtttggttttgttttcaaatgaacgttgtagattgtttccaccaggctttcagagaagccaggcatcctttcccttagtcctggagatggggtcttagtaacagaaaggttcctaagtggctactgcagctacaggatatttatgggtgacactattgatttctgtcttattgacaaataaataaatccgcttaactaatcttttccctgcattgaggtattttagagataaattttagcacttttttttcaatctttaaatgaaacacctgttagtctttattgatttttccccctctatatattagcttgctctttttttattctgcctcttctttaaagaggaacaggcaaccatgtccatctcttccctttacttggtgagcgaaggccaaggcccacactgccagtgtgtgagttcattgcttttgagagaccgttactacttgccaaggaaggacacaaggatgctgaggtctagctcgtaactgtttagcatgctcatagctacatacagaaggtgcagggccccgtgttcaacctccagtaccacaggcaaggatgccattatatatgtcctgtccatactgctgcagagattgtgaaagctgacatctctggtttattttaaaaggccatgaaggcccccgagctaaaggagaagctcgaagagtctgagaagctgataaaggagctaacggtgacgtgggaagagaagctgaggaaaacagaagcgatcgcacaggtgggctcctgaggtggcttcctcccgcctgccgtctcctccacaaccctccacagcagagcttctcaaccttccccatgctggaacctttgaatacagttcctcacgctgtggtgacccccagccacaaaatcatttttttgttgctactgttgtgaatcatgatctaatatatctgataggcaggatatctgattataccactcctgtgaaagggtccttcaacacccaaaggttgagaactgactcactagcttcacgtctttgagcagtcctgtgtgatgtcctgctggaacactccattgaataagcaaggctagggggatctttcctcctttctgctcctcctttctatccacattgtgatagagtgggcttttggtggtgttttgttttgtttgtttgtttgtttgtttatatctcttggcattgaaagctctgattggcagaaacttttaaaacacagcacaccataggtttttcgccatgtgcttctctgtgcttattgtaagatgctgtatgagcagtcactgaaatggactgccgcaagggcaatggagccggagtgtgccctgggtctctccatcgctccacactgtgcatttcatggacacggctaccgctggcctcctcgtacaagagcgtgtgttttcatgagaggccggcttccttttgttagctaacgtgttcccagccatagatcagtacctgccacattctacactttattgcataagtcttacgtggacgggtggactcaaggcctgtcatttcagggtctctacctgctcctccagccccatctctcactgttctccccattcgcttggagttgtttgcccctgaaatcgtctctgtgcactgagtctgctgggctttccaggggtcacgtctcaaacaactgatcttgcctcttgccgtggatatgcacccagtgttccaagaattgtctcacacattctccgcccatcctgatgtccctcccaggaagccatgcagcccccccccccccagccctccatgccacactgattctctctgttgtgttctggttaagcggtcttgtcctgtctcccagacttgcagtttctacaagccgacactgtgtgtttcacccgcggtgccctgtgacactgccatgccctccactgcggcccttagtaaactcagccgagccgggtagaatgtgtcatctctttggcattgtccccagaagcagtgacttactctttccatggatacgtcttgtgagtagaacaacagagcgtctcttcttctgtctgtttccgtgcccaggagagacagcggcagctggaaagcatgggaatctccctggagacctctggcatcaaggtgggggacgacaagtgctacctcgtcaacctgaacgcagaccctgccctcaacgagcttctggtttactatttaaaggtgagaagggctatgagaacagaccacagtgctcttgagtcatcccaactgaacctggatgccctgccccagaccataatggtacagcccctccccactgatcattagaaatggcctttgcttcacccatgcccttgaggacagtttccagaggggacaactcagggtacacccatagaaggacccaaatataaggtctcccagttggaggtgtctggggtccaaccacagttattctgagaggccttggagaatcgtcactgtaactctaggaagatatcaagtcacacacaagcgtaaagagaccctggagcaaagccccaagtctgtcttagctctgaccccaaggatgtttgttctgtggtcacctttcagaatggccttttagcattggcattgtgccctcgtgtgcactaagcatgctggggggggggggggcatctccaaagtggttttccatcatcctacctttaggtcccatgtgcattctttttttttccccctctgagacggggggggggggnnnnnnnnnnnnnnnnnnnnnnnnnnnnnnnnnnnnnnnnnnnnnnnnnnnnnnnnnnnnnnnnnnnnnnnnnnnnnnnnnnnnnnnnnnnnnnnnnnnnnnnnnnnnnnnnnnnnnnnnnnnnnnnnnnnnnnnnnnnnnnnnnnnnnnnnnnnnnnnnnnnnnnnnnnnnnnnaataggacccccgagccaggtgtggtagagcatgcctgtaacctcaggatttggcaggtgtaggccagaaagattggacgttcaggctcatcttccactgtgtagcaagttcagggccagcatgatttctccttttctttcttgcctgccccttaagagttaaaagagttcccagtcacagcgagtaccaaccccagctagttaacttctgcccagtcaccttcagttcttctagagctgacctggtaaattgtcactgggggttgaggtggggtggggtgaggtggggtgtcattggctgtcctctgcaccaaccccaatcgccagtgccacacctcactgtcttcctccttagtttacctgtggtggcaaagctggatgaagtggcatgctggtacccacttcaaatagtaaattttcaatccagaatgagaattcagtgcctgctactgctaactccaattttcttatgttttaaaataacacctaatcaccactgataaaggaacaggtgttggtagagtttaaacatttttaaaaaaatgtttgaaggtaagcttttggcttaaaaaaatattacattgtttgctgatctatctatctatctatctatctatctatctatctatctatctatctatctatctatctatctatgacagacatgcacatgccaaagagtgtgattagaggtcagagaacgattttcttccaccatgtaggtcttggggattgaactcaggtcattaggcttggtgatgaatgccgttatccgatgagacatctcatcagcccgcccttggctttgaagcgccagacctcccgtgcgattcatttcctactcctgatttattccaagtgctttgagcacttccggttgagtcccttgtgaacttggtctcccgtcttcaattgtatgttgtaggatcatacccgggtgggtgcagatacctctcaggacatccagctcttcggaatagggattcagcccgagcactgtgagatcgacatcgcagcggatggagacatcactctcacgcccaaagaaaatgcaaggtaggaggcgctgcggaggcttctgcccctccctcatttttaggaccctggccctttccccttgcttattgcagttatgtcaaagtaagaatacactagatatccttgaggatttaccttctgtttatggagggtgtattaattaccgttctcgttgccttaaccaaaaccaaacaaaatacaaaaccaaaaaccaaaggagggatatatttggctcctgatttgaaagagtaagatccannnnnnnnnnnnnnnnnnnntgtgtgtgtgtgtgtgtgtgtgtgtgtgtgtgtgtgtgtgtgtgtcacatatggagtggaaatcagagaacagctacaggcgtggcttccacattgcttgaggtggagtctcctgttcagcactgcataggcagggccagctggcctgggagcactcagggcctctgtgtctaccttccttgtctccctgagaatgataagaccacagttgtgtgctacacctccagcttaacctgggttccagggctctgaattcaggccctcacactagctctgcctaaagagccatctccccagctctggttttaagtgttatgaaatgctttctctcttcattagaaacacacagagttggggacccctctttgaggggactgggcaggccctggctcactgctgaaactgtttctgttactctttcaaatgtctcccagaatgcatccgttaggagaccggtccctgtcacttctgtgagtcttgaggctactgtcttctatccacctggcaccttcctttgtgtccctccaggtcctgtgtcaatggcacccttgtctgcagtactacccagctgtggcacggcgacaggatcttatggggaaacaaccacttttttaggtaacaacttcacgctctctagcgttcttcatttccttttttttttttttctgttatgtataaatcgagctggtatcatctaatgatgaaaacctccacagaattaacttgcctaagaggaaacggcgggactggttgaaagactttgagagagaaaccagttccgcggagcacgatctagacgctgcgagcgaggcttcctcggagccagactacaactacgagttcgcacagatggaggtcatcatgaaaacactgaacagcaatggtaaggcagtggctctggcctatgtcatctctgagggaccctggtgtagaagcagagctgtcccgaagcttagacacagccagctctttatctgcagagccatcatcagcaaggagtagtattaagactgcagagagaactcaggtggaaccagggagtgtgcagatggccccctttgggggacttcttgtcaccagaccagttatgatagcatttccatggtcacaaagtatgtactgaatggatttgacaaagatttttgtttttataattaaattttacatcattggtcttgtcatttctggaagagtgaaaaagttatggagaaaatacagattgaggagttttaaatattttaaatagtgtttactatgagctcatttgggaattatatacctccagagagacttacttaactgacaggctcaagtacctttcgtgaaaatgatgcttaaagcgaactgttgtccaggctggttacctgcgtaggacaatgccaccctgcctccaccggttcccctgagaggtgcttccctccgaggcacacgcacatgctctgatgcaggcagatgagcaggtggtcttggtgtcttcagcattccgtctcctgctaggtggcttccccatcgtaagcctgtcagcctggtggtcttccccgtggtggtcctacctgaagatcctcttccccctcctgtggtttcagacgaagctcgtccaccaacactgggagagaggttcttaacggctgccttagcatgtgggaacctggctggctttcagcggggccgctgagggatggcgagtgctttgagctttggcaaagtctgacaggcaggcagtgttggcatgaaacaaaggttttctgcctggcaaaactgcttcttgatcatgaccgaggaatgctctcttcccaaaaatggcaccccaaccatattccagctctggctccttcccactgtcccttcccatacacgtccagccacacaggagagggtggttagtgttacagctgctgttactaatggcttcattcctgcagagaactcagcagttcaggggggtggcacttttatatgtaacctccattatttcagtagtctcctagacctctggagtaagtactgacctaaaacgcagctcatttgcatgtagatgtgaaagaggatcagggaaaatggctcacccagtaaagcgcttgctctgcaagcctccatggaacccacagaaaagccgggtgcgcatggcagctcaccgtcatcccacacgggagaggtggaaacagggtccctggagcaagctgcccagcggaagttcttagtgagctctggttctagggagagtcctgcattaatatttaaagtaaggagccaagcaggaagatacttaatgttagcctgaggcctctacatgcatgcacccacgtgtgcaccctcacacagcctctgaacatccagacacacatgtacccatccgggcatataaaacatgaaaataaagtagaagaaaatctagctcagagcaacgctgtctttttcccaaggacttgaaatggaaatcaaatactaacctcttccccaagttcttctgaagccggttctaaagtaaagactgttagggaccagcaaaggttatgtttctaacatctgaaattagaagtttcttctctccccctgaagatggactcccttcacaacccagtgagagtcattccttatgttctttcttccttttttttttctcctttgttttttaaatacacacacacacacacacacacacacacacacacacacacacacacacacactgtagttgtcttcagacacaccagaagagggaatcagattctattacagttggttgtgagccaccatgtggttgctgggatttgaactcaggacctctggaagagcagtcagtgctcttaaccactgggccatctctccagccctctaacgttctttctgatgccctctaccatctcccgtgtcctgtcttctccgtgcttgaggtgatgggttagtctagtctcatttcatgtctgcctgctaagggaggagtaaactaattaagagattgctcgaatcccccaacaaagtgtcctttcctctctcctgaaaagaattttactctttggtatcctgaccttaggcaccggactcccaaaattataaaatgattgacttgaggaaagtgaagtgggggtgttgctcagtggttagggtgaccacctagtgtacacaaggccttgggtccatccacagcactggagaaaggagggggagaagagtaaggggggaattaagatgccagactcctcctatttggttgtgttgtcacaagtcaggcttgtggactggcccatctcagaggcagattacctggctattttattttattttattttattttataagagcaagagatactttattctagaaccatttttgaatgactataacttggagacacatatttaggttatcttaatttccatatttcaacatggaagaagtttcatgaagttttatcattttacaaagcagaagacatcataaatcaaggcaagtttaaaacacgttggtgggtgcatgagagaggcaggtgcagccagaggggggaagctttttctataggcccaagatgctaactgtgattcagggtctgtggaagctagtcgtctgctaagttaacggttcgaaacggttgttatctgttagtcacaggatgtcagctcagacacagaggtgggcaagggttgactgatccagagggctagcactagcctaagacctgcaacatggcagtctctccacagtactgaaattctagttagctagtagtcagtctctgtagacacggcttcgttccaagagctctcatttacagaacccgctgctggtcacacagcacattttgtgcagtgggcagtggaggagagaggtacgcacgtattatttattaaatattattataatgtcccttgtggctagaaatctcaccctaggatctgatatagttggggcggaatagcaggccggacagcagtgtctgggacagagaaaaggccactaaggaagaaacttgcaaatcatatcaccagtatcagccatattagaatctatttttaaaagaggcaaaggaatcaaactgattggcagagagagacatattatcaaagaactcccaggctggggagatagcttagtcagttctttccttcccattagaaagacctgagtttggtcgctagcactcacatttaaaggagcagcaaacacctataatcccagcactggagaagcaaagacagaagggtcctgtagcttgatgggcagccagtctagactaactggtgagccccagctagtgagaaacctgggtgtgtgtgttgggggtgggaggagatgactaagcagggtacttggtactaagcctggtgacctgactatgaccccccctccagatcatacatggtagaaggagaggagcaacccctgcaagttgtctcctacctccacagacatgccacagcatgcacgcacatgcacacatgaaacaaataaatatttctaaacgtggacagacagcgcctgaggaatgactctcacgatttacctccggccttcacatgcacacatatctgcacgcatcccacctcacaaacatgcacgcacacatgtatgtacactcactgaaaataatcaaaataaaatttaaagagaaataagagagaggatatgaggtaaaacagagcctggcccctgagcagggctgtgtccgctgagccccaggagcggacctggaagtccggcttgggaggctcaagcataggactaagttactgtcctctctgcatctgcatcttggtctgcagctccatttgttttgcgttacttggctgctggtgcagctttaagcagcctgcctgccatgcagcctcctagacaaggaacctgggttgagaacctgctggtcagcctctggggccacatatgtttcctcagcacagaaagcaggagtgtggattaaataagttcttcagggcctgggcagtaaaagtcaacgacaggttttgcttagcatgaacaaggcccaaggttcaatccccagtgtgtcattagggatcttgtcaccaaaccctgtaaaaccatttcttagtgatgaaaactgatgctgctttgaagaaacaaaaaaataataataataaaaaaatttaaaaaataaagatttttttttgagtaatctggctggttgttttgaagaccctgttctttgatgaatggccataagaagcaatcttcaggataaaaacattatatcaacctgtttatcaagttgttacttccgttgactagcccgcttccaatcagagctcaaaatctggtgtcgttggttgctatgcgactatgatttttctgagccccagttttcgagtaacattaaaacggagatgccatcgcccatagagaaggaggcggggtgggggcaggggctgaagggttcttcgaagatcatgcatgtggagtctgtccagtccctgcatttgagatgcagccagtagagtcagtgttggcatggcggctgtcttttttttattaaaacaactcacagcgtcttgcaatgatatggaactgctcgattttgctttgttctattaactttgtttttttaaggccagtgtgttctcttctcttacgtgctaatatagaaagaatactgtttatgcttattgtacaaactgatggggtgttttggaagcgtctcgtcgatagccgtgatcagatgattaagaaacttctgaagtacttgtcacatttttttttcttttggaaattaagcggagaactgaataggactggagcacgggttgtcagggctgcagggacatgctcgctgggagggacaggtctcccttcctcatgtggttgtcaagtgggccgacgcttcggagactgctcacttccattgtgacttggttcatgtgccattgtctggatctggtatccagctcattggttatcacactgggccctgaccagccaattggctcctcagagtcaggtcccacctgtaccacagctgtccatagaggtgctaagggctctatctgttgtctgtacatgtttgtccctggaccactaaagggtcagagggatgggtgtttcttctctttccctccctctttccctctccccctcctttctctctctctcctttctctttctttctttctttctttctttctttctttctttctttctttctttccttttcctttcttcctttcttccttccttcctttctttttttccttcttcccttcctcccttccttctttctttccttcctctttctttctttctttctttctttctttctttctttctttctttctcctttcttcctttcttccttccttcctttctttttttccttctttccttcctcccttcctcccttccttctttctttccttcctctttctttctttgtttcttcctttgtttcttcctttgtttcttccttcctttctttctttctttctttctttctttctttctttctttctttctttctttctttctttcaattgccctcttaggaattaatacctgagaatatccacaccctatacctagtcaatattttcaaaggtatgctgtgatttcctccccatctagggaaattcaagagtagggaagttcacagagcaagctgaagcccatccatcacatgcaaaagctgtgttcaatgagtgtagaggtcccgtgctgtagagatcaactcactctgttcccagccctgtgccatcctgggtttcacagtggtttgatatgctgttcttcccatcaaatgtggggaggtttgtgacacagacagataaacatgagggtacacgcagcccgctgaagaaggtaacagtgggaaaggtttacagttagctcaagtgttacccaaaggcaaaccaggaattccctgtgagccctcaggcctgtcacaggaagcagaggaccaggcaagattctgaggcaggacatgtttcttcctggaagaggccccgaaaggcacctgtgtagactcccgtccctatcagccacttacaacctcttgcctcttctcttggctccccagatccagttcaaaatgtggttcaggtcctggagaagcagtacctggaagagaagcggaccgccctggaggaacagcggctcatgtacgaacgcgagctggagcagcttcgccagcagctctctcccgagaggcagccgcccagcagcgcctcagaccgtctggcctacagcagccagacagcccagcagaaggtgacccagtgggccgaggagaggtaaggataggcacagaccccaagtcgggaatgagggctgcaggcctggagaggcctgtgaagggaggagagacctggaaaaatgagattggtggcccggatctagtttggctcttggtgttttgtttcagagatactaccccatcctaagttgttcgcagtaatgccagctgccacagaccgcccctccccccaggcccctaatcttttaccctttggtaaagtgccaaaggagagggcctagattggtgggccctgagacagctgaagtgtgagtgactcttcaacaacaatctgaagacgcagacagaaagcagggaggttggctggttggtttctttgcctttttctttcagaaggaggttttggtggttgaaagcctggccttttcccaagctagatgcccactgccactgagaacacccccagttccagggtagcagaaacaggaagctggagaggagaggaaagtgtgtttggaagcctgtgagcaggctgttttgttgactctggaagtgacttacagaggagctggaagggttctgtctaagcctgagattgagcgtgtaggagatgacaagcagggcctgtcaaaaatgaccagggatgcttggaaggcagaaagactgtcaggaaggaaggaaggaaggaaggaaggaaggaaggaaggaaggaaggaaggaaggaaggaaggggaaggagaggaacaaaatattgtggcagccctggctggtctggaactggctatgtaaaccaggctggccttgaattcacagagctctgcctgtctctgctgccaaacgtcctaggattaaagacatgcaccacaatacccagtgcctaggtttgtgtctttgtttaacaccaaccctcaacccctcaatgttttccccaactttagttctcagtgagtgacctatctgtggacaggagggaaaacttcctaaaagtagttttgtaattgtcaatggtattggttaccgtttcctggcagtcccgcacgctgagaaaggaacggaactccggctcacttcgcctgtgcgtgctttcttttcttcaacgttgcagggatgaactctttaggcagagcttggccaagcttcgagagcagctggtgaaagccaacactttggtgagggaagccaacttcctagccgaggagatgagcaagctcactgactaccaagtgactctgcagatccctgcggccaacctcagtgccaacaggaaggtaggcatggccctagggaatgggaccacatgatggaggctggtaaatgctgcggatcggaatctatagatcacctctgtgggcaggtcctaagggggtccggggggcgggggtggctctgtaagccttcgggttggtatttacccatgggtaagcatactgggtaaacacccttagaagggacagaaacagaaggctaggaggtggtgtgcatgcctttaacccaggctctcaggaggaagaggcaggcagatctctgagttcgaggccagcctgagctacagaggaagttccaggacagccaaagctataagagaaaccctgttttgagaagaatgaggaaggcaagggggaagaaaaggatggaagcataatttggtggcagaaggactttctgacttagtcacttccttgaaaagattgaaactagggactcagaagatagcttcgctcacaagcttgatgacctgggttcaattcctggctcccgtgtaagaatggaatgcgacacagagttgtcctcagacctccacaggctcatagtgcccaaccacatccatccacccacagtaataatcgaagtttcaaaagagtgaagttaggcatacatgtgtgtttatgcatggacatacatacatgtgtaagtatcatgcctgccttccttcatgcaagcaccccttctgctgtgagggtgtgtgggtgtgcttgcttgtcccacctttctctgagtggactctgagaaggagaaacatcttggaaacctgctagcacgcacacagaactccttagagccatctggaggtctcctatcattacaacatcaagagttgactgtaaaagagtaacctggaagaaaatgaattttcatcttttttttttcctgcccagacagcaagttaaaaggaaagttgtgtgtggggagtggagagagagggctcactcaggtaaccacttactactctgccagaggacccaagtttggttcttagcacacacatggtagctcaccattatctggaactccagttgcaggggatccaataccctctcctggctctgaggcaccagggacacatgtgcacatacatgcatgcaggcaaaacacacttgtaccataaaataaagtctttttttaaaattttaagaaagtgagttagggagtatcttattggtctttagagttctacatccacagacagaggcatgtgtgtaccttctttctgtatatgagaattttttatagtccttttcttctttaagactgattgattgattgattgattgactgattgattgatgtgtgtaccttctttctgtatatgagaattttttaatagtccttttcttctttaagactgattggttggttggttgattgattgattgattgattgattgattgagacagggtctcataatcgcctgctgccctcaaacttactaagtaactaagggtgaccttgaacttctgctcctcctgtctttacctcccaaatgtggtcatgatgagcatgcactaccacatctgttttagatgaagctggggctgtaacccagggctttgtgctagataagccacctgagctaagccagtgtgctaagtaagtcacctgagccactccagccctcacggttgaatctgtgtaacaaaaacttgaagtccccttgcaattgaatagtagtcagaatatgataaattctgtgtgatgaattcctatgttgnnnnnnnnnnnnnnnnnnnnaactagggactcagaagatagcttcgctcacaagcttgatgacctgggttcaattcttggctcccgtgtaagaatggaatgcgacacacagagttgtcctcagacctccacaggctcacagtgcccaaccacatccatccacccacagtaataatcgaggtttcaaaagagtgaagttaggcatacatgtgtgtttatgcatggatatacatacatgtgtaagtatcatgcctgccttccttcatgcaagcaccccttctgccgtgagggtgtgtgggtgtgcttgcttgtcccacatttctctgagtggactctctgagaaggagaaacatcttggaaacctgctagcacgcacacagaactccttagagccatctggaggtctcctatcattacaacatcaagagttgactgtaaaagagaaacctggaagaaaatgcattttcatcttttttttttcctgcccagacagcaagttaaaagggaagttgtgtgtggggagtggagagagagggctcactcaggtaaccacttactgctctgccagaggacccaagtttggttcttagcacacacatggtggctcaccattacctggaactccagttgcaggggatccaataccctctcctggctctgaggcaccagggacacatgtgcacatacatgcatgcaggcaaaacacacttgtaccataaaataaagtctttttttaaaattttaagaaagtgagttagggagtatcttattggtctttagagttctacgtccacagacagaggcatgtgtgtaccttctttctgtatatgagaattttttatagtccttttcttctttaagactgattgattgattgattgattgattgattgagacagggtctcataatcccctgctgccctcaaacttactaagtaactaaggatgaccttgaacttctgctcctcctgtctttacctcccaaatgtggtcatgatgagcatgcactaccacatctgttttagatgaagctggggctgtaacccagggctttgtgctagataagccaactgagccaagccagtgtgctaagtaagtcacctgagccactccagccctcacggttgaatctgtgtaacaaaaacttgaagtccccttgtaattgaatagtagtcagaatgtgataaatctgtgtgatgaattcctatgttgctattggaaagcaagattatgaagaatatccaatgaaaggaattgtgaggtaaatatacatagatctatagatacatagatctatgtagaaaagaaagaccagggcattccctaggtggtaaagttttactgtcttttgtaaacttagaacctcacaatagtatatacagtctttaactgtgtgtgtgtgggggggggggggctgtcggagtcatgtccgctctgtcttccatcacaatacagagaggcgcaatcgtcagcgagcccgccatccaagccaggaggaaagggaagggcacccaggtctggaccattgagaagctggagaataagctaattgatatgagagacctttaccaagaatggaaagaaaatgttcctgaggtaagagaaacagagcatgaaggagacttggccgaatgaagaccacaggtataatggtttggtcatttacactagggagataaaatgtgatctttaagggccaatcgcacgtgattcagtccggtggacacggaatccaggaaagccaggcgggacttagtttgcgttgtgctctttgactttcaagggaaaagaggagaaaagaagtcgctccaggcatgcgcagtcgctccgtgctatcagtccgtgtcctggaaaattacaccggccgaagccagtgtggatttcatcttcatccccgtctgcgcatgtgcccctaattgtctgtgcccctagctgtgctcagggctgggtagatttctgaagtcatcatagcgaatgtaatgttaagctttgcttttaatatttgatgttagtaataaaaaggaaaatctggtgaaggaattggtgtaagtcacagggcatgacgtaaagcaggcttcaggcgtggggtgagtgaagctggggctcctctgcgtgagcgtcccctagcaaacacgccccgctcgtgtgctgggtctctgtgggcacgattctgattgcacttgcttatttttacgaatgcttcctctaaacgtttttagtgctaatttgaaataacatcatttaagttgatgcgttgtttcctgacttctcacccaatgacctattctttttctcaggccaagaggctctatgggaagcgaggtgaccctttttatgaagcgcaggagaatcacaacctcattggtgtggctaatgtgtttttggaatgtctcttctgtgatgtgaagcttcaatatgcagtacccatcatcagccagcagggggaggtaaggacacgccagcccctaggaaatgacagaataggaaattttgtttaatctcttgccttgagagagatcaagaagaggtgtgtgtgtgtgtgtgtgtgtgtgtgtgtgttgctcttcttttgttttatccctcttaatataagtcaggattaagccatgatcttaaaagataacacatttcatatttgtggttcaaaaatttttttctgttttaattttggtaataagttttgctctttgctccatattaattttttcttttaaaaaccacctccaatgatagccatccacgccagttccttcctggatcatagatgtcctttacaaggtattgcttagattcaggagtggtggtgtcttcctttgaccctaacacttaggacagaggcaggcagatctctgtgccagcctgttctaccaagtgagtctgaggacagccagggctgcacagtgagaacctgtaaacaaagaaatgagaaaataaaataaaaaataaaaaacctcagaagattattctgaagccctaagtaacaaagaaggcagcctttgttagtctcctttagacagccgtatttcaacagtgtgagtgtatttgccctttgtgggccttggacacgttagaagacattcatgtgaaatttttaatttttccttaggtccatttttactttgacaactttattatttgattatactgtggctacagaaagactcaaataaaatgaaattcacccagtacccctctgaccgacagcataataagattgtctatagtctcttctcgtctctttgtacgtttgcactgctcttaaaccaaaccaaccttgcaaacttacccatttttcccatttcgtattctggagcggccattttattatgtgaaaatgtgctcttcagtttattggttcccaacccaattgtagtggaaacataccttagctctaacttttggatattcagttgcttggactatcttctgtcatagttagcactatacggctctgatcttgttaaagaaaatgtcctggagcacccaggtgcatctgtctatttaagcttgtggtgtgttccagcatacggccctccagaaagagtccatttctctttgtatttgttggcagcataggggatgatcacttcttgtgcccccctcccccccacacacacacacactacagtataagattttccccagaacccactggctgtttgctggtctcctgtattctgcagtcttagacaccatcttctatgggtaaaggcatgaaagctatgtgtcttagattcagacttctatccaactcatcaactggtgtttttctctttagtctcaatctttaactccctagtttgttttatataacgtataaacttgaactacaaagttattccaagctgggcatggtggcacacgcctttagtcccagtacttgggaggcagaggtaggtggatttctgagtttgaggccagcctggtctacaaagtgagttccaggacagccagggctatacagagaaaccctgtctcgaaaaaccagaagaaaaaaagttattccttgggattcttagaataagatatggtttacaaagggtagctgggaataaacctgggttcccagggtgggatataagtgtgtgtgtgtgtgtgtgtgtgtgtgtgtgtgtgtgtgtgtgtaggagctgggaccttctggataattctgccccagtgaccaccaatgcatctctcatgctaaaaatataacttaagtgaccagtgtagcctgtgactgaggccctctttaagggcctcttaatctagagtcctgggcaggctctgggtatctgaaattatatcacaatgtactcagggggcccatagatggctcagcagggtaaaagcacttagccatgcaagcctaatgacctgagttcagtctccagttctcagattggaaagagagaaaggacttctaagtgtttccctctgaccatcactgtggcacgcttacacctgtaagcacacacacgcgtaaatacataaacacgtgttcagtcctcagacgagcaccgtatgaagcactgcactgtgcttctgcccctcggtacttctacctctgaatatcgcttgtcagatatcaccagctgatttctctcagatccttggccctggtgccagttggtatgtggaagtctgagcattaaacataacccttagcctggggtggtggcttatctctgcaatcctagtattcagaagttaaggcagaaagattgtgcatttgagcagactgagtcatttccaaaagaaggaaggaaggctaccataccggacctgctccagtgaaacgctaccatgatcagaaatataaacatcctaatggcaaatggagagcagttatttaggggtagggagaatgtctcagcagttcagagtggcttgctgctcttagtaagggcccaagttcaagtccaagctccccagtcagatggttcacagctgcctatgactccagttccaggggcatctgataacctttggcctctttggacaccagcacacaagtgcacagacctacacacatacgcataattaaacaataagttgaacaaaagaatcgttacgcagagtggacattggggggagacctgcctatcattgaagcactctagaggctgaagcaggaggattccacagtgaggtcaacctgggctataatagtgagaccctgtctcaacaaatcaaaaccttgaacaaacaaaggaacaaacaaacaaacaaacaaacaactttcccatgctggatggctttgttcctgccatcccttctggtaagagcctggtaccaccccacaagtccgttttcatgcagctccatgttacaccccatcctccctccttgagccggggaccatgtctgcctagtgcactgtgggaagcccagtgcttggcagtttctgcccccatccatcctgggtaaatactcgctacacgcatgcgcacacatttgtcctatgcacacccagtacctacacctttctgttatgtcgactgctccatcctgtcattggctcttgtttctcgttctctttctgcatttaaccatgagttcactagcaagagagcccactccctggagttccaagattacccaagcacggtatcaaagaaatgcatgcgcaactatgtaaacaagcacgaaaccgaatgtttcagttagagtatgataactccctggaagctgctccttgcctgagctgaggaaaatggatacacctaaggagagttctagaaagcaagttgggaggagcagatttggttcagagtaagaaaggagggatgcggttatcatcctgagtgaagtaacccaatcacaaaggaactcgcacaatatgtactcactaataagtggatattagcccagaaacttaggatacccaagatataagatacaacttgccaaacacatgaaattcaagaagaacgaagaccaaagtgtggacactttaccctttcttagaaatgggaacaaaacacccatagaaggagttacagagacaaaatttggagctgtgacgaaaggatggaccatctagtgattgccatatgcagggatccatcccataatcagcttccaaatgcttacaccattgcctacactagcaagattttgctgaaaggacccagatatagctctcacttgtgagaccatgccggggcctagcaaacacagaagtggatgatcacagtcagctattggatgggtcacacggcccccaatggaggagctagagaaagtacccaaggagctaaagggaactgcaaccctataggtggaacaacaatatgaactaaccagtacccaggagctcttgtctttagctgcatatgtatcaaaagatggcctagtcggccatcactgcaaagagaggcccattggacttgcaaactttatatgccccagtacaggggaacgccagggccaaaaagggggagtgggtgagtagggggttgtgggggtggttatgggggacctttgggatagcattgaaaatgtaaatgaggaaaatacctaattaaaaaaaaagaaaaaaaaaaaagaaagaaaggagggatgcaagggcaagcgtgggcttgccaggctctgggtgggtgggtttggggtctccttcctggaagtggcttaggagggagcgtctcccactgccggagatggacagccagagctgtagagtgaatttctgtctcctgctagcattgcccagggtatacctttgaactatgctcctgttccttgacccaggttgccgggcgcctccatgtggaggtgacgcgcattacaggaaccattccagaacgcatggcggaggatgactcttcagagaactctagtgagagcgggagtcttgaagtggtcgacagcagcggcgaagtcattcaccgggtcaaaaagctgacatgcagggtgagagagcagtgattggggctcatgtagaccctggtaatgccaggtgagagggcattcatcagggggctcagattgctgggtgagatggcagtgatctggactcatgtagaccctggcaatgccaagtgagaaggcggtgatcaaggctcaggtagccaggtgaaacggcagtgatctgggctaatgtagaccctggcagtgtttgatgagagggattctcgtagaccttggaaataccggatgagagggcagtggtctgagctcccgtagaacctggtgggtgaggggggcggtgatcggggctcatgtagacactggcaatgctaggctatacccacaaagtttgataagatttcatttagtactatgcaagtttaactgtctgacaggagatgtggctgtgagcagcacttctagaattctgtcgtgacaattgtttgaaatcccccccctaaaatcccctctctgcattttgtatctagacaaaagtgatttcatgatgcctttcacatacccaaatcctctcaaatcccttatgccctgtgctttcgtatattctatctatacacatcctatctacacacttcaaattatctccaatagaacagcatgcagcgtggtacaaatgtggtgtgtgtgttacatcacagtaccagttacctttgattttaagattttatgtagtcctggctatcctgaagtttaccatgtagaccatgcttgcctccaattcaacagagatctgcctatttctgcctacttctgcctcctgagtgctggaatactcaccaccacacccagcatcagttggttctaattttctgacacagcctagagtcacctgatagagaaattacatcagacaaattgtctggtgggcctgtctgtaggagattgtcttaattgttaattcctagaagagagcccagcccactgtgggaggcaccattcccttggcaggtggttctgagctaaacgagaaagctagctaagcatgagccagccagccagcaatattcctccatggattctccaagttcctgcctggacttccctcagtgacagtctgtgtccgatcagcttgaaattaattctttctcccccttaattgctttcggttatggattgtaccacatcaacagaaagcaaaccataagttgcttaaagagtaatgacaagaaaaagtctacatgctgtcacgacagtgtagttgttttgggtgtatctggtctgttggttaaaccacagctgtcaaatctataaatacagaaggccgtgtgtatggctgcatggagaatttattagtgagttgtggtttttttctaataaaagtcaaatctgtatcagaaactaagtcacgagtaaattagacaggaatgtgtttggggttcctttttttcttactaagtttgtattttgtcgttagaaaactgtggtacaggttttgttttagatggaacactcaggatggtggggtgactcatcaggaaaagaggcttgctgcctagcccaagaacctgagtttagtctccagaacccacatgggaaaggaaggaatcgactcccgtaggtccctccaccacacacacggcacatgtgtgcacatagcaaggcgaatataatacaatacaatacaatacggaactatattattttccttacaatttctagtggataggttcatacactagacatgacggtacatacctttagtcccagcactcaagagacagaactgggcagatatctatgagctaaggagtccatggtttatagttttaaaaaaaggctgagctgggattacagctcagtctgtgtgaggctctaagttctctgcaagatagatggatggatggatagattagatagatagatagatagatagatagatagatagatagatagatagatgatagatgataaatagatgataggtagacagaagatagatgataggtagatgattgatagacagtagatgatagaagataggtagatgatacatagatagatagatagatagatagatgattggtagataatagatagatgatagagaggtagacagaagatagatagaagataggtaaacagatagatgattgatagacagcagatagatgatagatagatagatagatagatagatgatagattgataggtaggtagatagatcaataacaatgaatggtctcaaatatttccaaatgatggctcaattatgtagtcctggctgtcctggtattgatcccctgatttgatcccctcttagagatgactgaactatggacagataaatatttttgtgtttctttttaaagatgcataatttatttttaaaatctcttcaggtgataattaaagaggcaaccgggctacccataagcctctcaaatttcgtcttctgtcagtacacgttctgggaccagtgtgagtctacagtggctgctccagtggtggacccagatgtgccctccccgcagtccaaggacgcacagtacacggtgaccttctctcactgtaaggtacggagacaattacaaagtgaggtaccaggccagggatgacactctacagtgacatgtgagctgaggcccctccgtcagtccccagtagcagaaacgcccaccacagagccactgtcagctgcatgatggggcagtggaattgggcacggtcttttaaaaatctgctttttatttataaataaagaataaaatgtgtagtttttgcagtgaactccacagcattgtgtgtaattctggggtttgaacaggacaccttccaagtgttttttgatttcttgattgttttcaaggaccaaaacttcctcattaacttaaaaaaataggagaatttttattattacccggcagcttcagcattttagtccttttctcactcagctccttttccttgctcctccccctcacacagaagcccttcttcccagcaggtccctcagatttcacaccatctcttgctgtgtctgtcggccactgagtccagaggttcatgcctgagcgtgagtggaaagttatgggctgacacatgggcaacctcctgttgtctacaccgctgaaggaaataacaccccttctccccagatttgttagatcactacagagtcctgctctgtagctcaagcaggcctaggactcgatatgtagcctactccatccttcagctcatgatggtcctccttcctcagcatcccgagtgctggggttacaggcaggagccccaggcctggctaagatctacttctaacttgtaagttctctccatatgtggtggcacaagagagctgagacagccagatcacaagctcagaggcaggagagcctattgcaaaaagaaaagtttgccctataagtttttttggttttggttttgcttttcttcttcttttaaatataatataccttattgggctttgtacagctcaactgttctgcattacaaattgaaataatatgggaacatataaaaggaaatctgaaagatcccatcttccagtcttactctgcccaggtgtaaccatcaatgatatttctccttgtagtatattacctttggtttcattgtattttatgttttctgggatggagtctgctgaactgccatgtcagccttgagctcctgggcctgctctatcctcctgagtagctcaaacatcgcatgcatgaccctgggttctgccacatattttaataagctatttcctgagtccctgcatcacctttctggcttctgctgggcactgtcacctaatgagttcttaaaaacagactctgccctctggtaaggctcctcccagatggcctgaccacactgcctctccgaacactgtagctgttctttctggctccaacttagaaaacaaatccctgttaccacctgcaaaatgtccgacatacaagactctcaggtctttctttttttcttaaataaggtttgcttacctactcactcagtgtatatgagtgtttggcctgtgagtctgtatgcatgccatacccacggccagtgttcccagaggctggaagaggtgtcagcctgtagagctagtaaccatcgagccatcctccctcaccccgagcctgcttgtctcaacctgcatttgccacaccacattctcagaaatctttagtgagaatgttgacctgcaatatttatttcttaatacttaaattagcaaacaagagttataggccttacaatggcattttctttttcttttctaagatttattttacttttatgtgagtacactgtagctatcttgagacacaccagaagagggcatcagatcccatgacagatggttgtgagccaccatgtggttgctggaatttgaactcaggacctttggaagagcagtcagtgctcttaaccactaagccatctcttattatggcattttcatatgcctgagtccttttaccttgttctgtttcacccccctctccaactttgccttcacccatacccttcccccacacactggttcctttcttctcctaagtagaatcctcaccaacacacacacacacacacacacacacacttctgttgttgttttcctaatagtcttttaaatcgtcgcattccttctttttatccactgggctgtttacatcagtaagacaaaggctagattttaactgtgtgctgtttaacaactgtttaaatacccagggatctcaaagcccctgggctagtgtgtggttttagaggctgttggatttttgggttttggtttttttaaagatttatttattttatgtatatgagtgcattgttgctatcttcagacacaccagaagagggcatcggatggttgtgagccaccatgtggttgctgggaattgaactcagaacctctggaagagcagtcaatgctcttaaccacagagccatctctccagccctggatttttgttttgtttgtttttcttttttttttacttctaaagtatgtagcttggactaattgaccgtcacgtttcttttccttctaaaattctgggtctgtctccagatgaaataagaaagtaggcagtataagttcagtcaacttaatagctgtttctggaaatgagtcaggcagaactgcacctgagactccgctcgggcaccccaggaggcccatggcaaggaaagtggcttggctttgagcctgcggaatgttccaggtgacctgccaccgttctcagggaactctgcaaatctgcacgattgtaggttggttttgtagagtgagaaactgcagtgagacactcaggggcaagagcctacaccatggaggaatcagatagttgggagtcccttactcagtaagtctccaagtgcagcaagggtcacctggaggtcagagtggctcatgggaaatgaccgtgagccaacggaagagaacgtaaatcctggctttgcaccaaaagccagaagttggaattcagacaagttgctttcttcattagacccaagtcacctcctaggtcccttccagatctaacaccctgtggcccttcatacttttctacagagacagaaaagatggggtttacgttcgagagcaggtaagtgggtaccactatgtctgactctcagtgtgctctcctgccttctgcttgtcccaggactatgtggtgactgtcacagaagagttcctggagttcatttctgatggtgcgctggcgattgaagtgtggggccacaggtgtgctgggaacggaagccccatctgggaggtggactcgctccatgcgaagacaaggacattgcatgacaggtgtgttcttgctgtgagcatgagacccgggagtcaggaccagctcatgaccataagtgagatgagaggcttcaaatcctggggcttcgaacaagttgctcctcctttgaggccatttcctcctttttaaattagaattcaaggaggagcaggcaagcatcaaaaaacactgtgcaaagtgagtcatggcaacaggaaactgaaataaatgttgtttatatgggaaaaaaatcctttatttcactttacatcatatacaaaaattgctatgagacaatcatatattgatttttaaagttattacattatttatttgtgtgtgtgtatgtatgtatctgtgtgtgtgtctatgtatctgtttgtgtgtgtctgtgtgtgtgtctgtgtgtgtgtgtgtgtgtgtgtgtctttgcatcccagtgtgtgtctgtgtactcacaggtagaggtcaaaggataccttgcaggagtctgttaccaacttctaccatgtggttcccaggacttgaattcaggttatctgggttgaaggcacgcctctttacctacaggggctatcttgttgacccaaatcacaaatttagatgtgaagcaaaaccctataaaactggcagaagaaaataggatatctttttttgttggtttttttgttgttttgttttgttttttacgagacaaggtttctctgtgtagccctggcagtcctagaactcactctgtagaccaggctggcctcgaactcagagatccagagatagatagatggatgggtgggtgggnnnnnnnnnnnnnnnnnnnnnnnnnnnnnnnnnnnnnnnnnnnnnngatggatagacagacagacagacgtatgccatctgtttgtctgtctgtctacctatctatctatctatctatctatctatagggctaagcatatggggccctgcatagtggcttatgcctttatgagtcacagcactcaggaaacaggcagcagataactgtgagttcaagggaagctaaggctatctagagagaccctgtcagaaaaagaaagaaccattcatccattgtgtcaatgtgatataaaccagactcaagagtccataccacatggttttggttttaggacattttaaaacaggcagagctaacttgagtttgccaaagcccctgggattctatacccaatctgtgttcgtcacttaaatgtaaggtctggtttggttaaatagcctaagaatccataccacagggtctctcgagtgtgaaacgaggaaggaacctgcgaggcatccctggcacagcgcctccctctcagtacgtgctcagtacgtgctcagtacgtgctccgtggttgggttcgtgactgttgcccgtggtgcccctggatgatacattgcctgctgggatgtggtttctgcaggtggaatgaagtgacccggagaatagaggtgtggatctccattctggagctgaatgagctcggggattatgccgctgtggagcttcaccaggcgaaagacgtcaacaccggcggcgtcttccaactcagacaggtatgaagtttgtctgagggtttccactgctgtgaagggacaccataaccaaggcagttcctacaacggcgaacaattctttggtgctggcttacagttccagaggttcagtccattatcatcgtggcagtctgtgggcagacatgatgatggggaagccaagagttctacgtcctacatcctggtctgaaggcagccaggaggagactgtgtcacactggccatgacctcaaaaccccacctccacaatgacacatttcctctaacaaggccacacttcctattagtgtcacttcccatgggctaagcatattcaaagtattatgaagtatttcttggggtttttttgtttttctttactttttttttttaagatttatttattttatgtatgtgagtacactatagcagtaccgatggttgtgagcctttatatggttgttgggaattgaatttttaggacctctgctctctctggtcagcctgcttgctcagtccctgcttgctctggcccagagatttatttattattatacatacatacactgtagctgtcttctgacataccagaacagggcgttagatctcattacaggtggttgtgacccaccatgtggttgctaggatttgaactcaggacctctggaagagcagtcagtgctcttacccgctgagccatctcgccagccccctgtttatttattttttattagatattttccttatttatgtttcaaatgttatctaccacgaagtcttttgatggtttgtttttcatgtctcttctctactccaccctttttttgttgttttggtttggtttggtttgattttttatggtttttcgagacagggtttttctgtatagctctggctgtcctggaactcacttggtagatagaccaggctggtctcgaactcagaaatccacctgcctctgcctcccgagtgctgggattaaaggcgtacgccaccacgcccggctctactccactcttagagttcctgggaataccctaattatttgtatgtctgttctcaaaccatttccccttgtttccttcctctttccccatccctattcctgacatcttcgcttccttcacctctgcagggtcactcccgtagagtgcaggtcacagtgaaacctgtacagcactcagggacactgccactcatggttgaagccatcctatcagtatccattggctgcgtgaccgccaggtccaccaagctgcagagagggctggacagctaccaggtaagacacgtgtctgaagtactatgtaccggagtctgtctgggggtgtggcttgcttggagagtgcttactgagctggaatctgtacccagtattttagaaaatgttatatatatatatatattttttttaattttaaaaaagatcaacggattacagcgatggctcattggttaagaatgcatactgctcttacagaggacccaaactcaattcccaacacctatgttagacagcccataaccacctgtaactccagctcctgtgggtctaacaccttctggcctccaagggctcctgcacatacatacacgtatctacactcagacatatatacatacacatgttaaaaaatacaatatatcaattagaaaatgaataattaaaatcagtgcagacaaaaattgatgtacaatagaaatcctatttgggaggacaagaacctggactgcgcaccttcctccgggtcttatctccaacttttgccttcccctggataaaatgctgtgtttgactagtgtggttagtaaggttcacttctcagcactctagtggtcacctgctttgagctgcttccattttagaccctgctcagtatatgtgaatgttaccgctgccccaatcctcttgcactggtaccagaaaattgaacctgtataccgtcacgttaaaccaatctttttttttaattaaatattttcctcatttacatttccannnnnnnnnnnnnnnnnnnnagagagcagaggtcctaaaaattcaattcccaacaaccatataaaggctcacaaccatcggtactgctatagtgtactcacatacataaaataaataaatcttaaaaaaaaaaagtaaagaaaaacaaaaaaaccccaagaaatacttcataatactttgaatatgcttagcccatgggaagtgacactaataggaagtgtggccttgttagaggaaatgtgtcattgtggaggtggggttttgaggtcatggccagtgtgacacagtctcctcctggctgccttcagaccaggatgtaggacgtagaactcttggattccccatcacactcccctacccacccactcccactttttggccctggcgttcccctgtactggggcatataaagtttgcatgtccaatcttactgctctctttttgttactataaaaactatgcacgggggctggagagatggctcagcggttgaaagcaccggctgctcttccagaggtcctgagttcaattcccagcaaccatctctaattggatccgatgcccttttctggtctgtctgaagacagcttcagtgtactcatataaataaaataaataaatcttaaaaaaaaaaccctaggcacgtgatcgctttgtccattaaatctccatccctaaagtccattgttctcattaagaaatgaaaagatgctgggtatggtgtgacgtgcctgtcatcccagcacttggaacgtggaggttccttctcaactgcagctacatagtttggggctagcctgagctacatgagacactggagggtgggcagtgcagaaagctagtctgtatgtatcccaggagaaaaaactctttctactatggtttggacaaatgtatgggatccaaaggactgggcacaattggactggggtcccctcttgtcacatgtgataaagaacatctctctgacttgcaagaaaatatctccctctgtttttctaaggagtctgggtaccagcttggccgatcctgaaaaatggttatcttcttctatggtttctctttggttttgtcgttggtgttgggacagattttctgagagctggagatcattcagagtcctggggctttgttagactctgccctcttccctttctaccaaacatctctgcagctcagggtctacatgcgcccttcagatagaacaaaggtacaaggagatggggtctgtggtctgaggcacttctctaccaagcttgtgtgtttatagcctatgagtaaggaattaaattgtccttatccgtgctctagggcatagccagtccctagcagagccagggactcctagagtggccacaggagtgggtagttggggtgagcacaagactcagagtcaggagacccaggtcctccatccacttctggttcacttaaacaccgaattcttcctcatctaaaatgatgaagtagactctaattctcagagtttcttcctgcaataaaactgtggctctgtccacctccagtgtcagataaaacatggagttcaggtaacttaagctttgacttccacaaagaaaatcatcagctttgctaaacagtcccgatttcgagagttttataagaattctttgcagtttttaaatttgttattatttcacattatgtgtatgggtgttctgattatgtgtatgtctgtgcagcatggtgtgcctggtgcccgtggaagccagaaaaagattcttgactcaccttttgagtgctgggaatcaaacctgggtcctctggaagaacaaccagtattctcaaccactgagccatgtctctagcccttgtttatagtttttttaaaatagctttacctgttgagttaaaactgatttagggtggggatggtggagggagctgggcatagtggtgtacacctctggagagcagaagtattcagatttctcatgtaaattcaaggctggcctggtctacacattgaattccaggcaagctagggggatgtagagaggccctgtataaaaaaataaacaacaacaaaagaactgatgttttgttaaaaatgtggatttgaaagaatgagctgtagccccggagctgcaggtatcttaggagcatccttccctaggctggatggtaagacacatgcttatgataaacatgcgtgagatcctggcctcagtcctccgcacctcaagagaaaagctggtgctagtcacacagaatcaagctgtggtcatgttccttctcttaccatgttcaaggtcatatctagagactgccgtgggctcggtactttacgagcttgcttgctgaagccaatgcactatacaacagtgttgttgcctgaaagctcaggctaggtttgggttgatgaaattagctttttagtctaaaatgtgatgctaggttatagttgtccgttctttggcacaaagaaaatcagttcatgataaattcgttcagccttcagctacctcttaatacattcatcttggaactgctagtgataatataacaggctttaaaagacatatattctggtgtgcatgtgaaaatgactgttactacattttaatgactctaatatcttctcatgccactaaaaaaggttgttataagtttaaataaaagatttcactgggactctagctgcatatgtatcaaaagatggcctagtcggccatcagtggaaagagaggcccattggacaggcaaactttatatgccccagtacaggggaatgccagggccaaaaaatnnnnnnnnnnnnnnnnnnnngggggggagggtgtgggggacttttgggatagcactggcaaatgtaattgaggaaaatacgtaataatttaaaaaaaaaaaaaagatttcactgggcatagcaaaacattcctgttatcccagaatttggaagacagaggcaaggggaccagtgtgtaagttcaaggctaacctggtctacatagtaagttccagtccaaccaaggctgcatagtgagacccagtctctaatgtgatgataataatgatgaagaggaagaggaggagggaggggaaaaagaaggaagaggaggaagaggaaaaggaggaagagaagaaggaggagaagaaggaggaggagaagcaacagcagcaatcatcatcatcatcatcttcttcttcatcatcatcatcttcatcatcgtcatcatcatcatcatccaggatttctgtagtttcctttctaaggaaaattgtctctacccaaactcctggtttcagctcggttctttatcttgcctaatgtttttaccaaaattgttactttggttaattattgtgaaagtcagccatgcctttggggcagttgtggtccagccaccatggacactgatagcaggtacattccagtggctcagctgcccctgcaggcgccagcataggacattgtgtgcccttagtctcaggtcctcaggcattcctgtggcaacttcatccctgagtgatggactccaaggaatggctgccggggatggagactagagtcccagcttctgtcctgagcggccaccatctgtaagatccttggattcattgtttcatcctgtagggtctcagtgagaagagaatctctaagtgggcacagtaggttttctgtcttgctaagagcatcccaaacttcacccgtgacaacctgcctggaatacatgtcacccatgacagcagcacaagggctggcccagtgaagtcactttcaatccttttctaagagaattttcttttaaaatatttgttttccttactttaaaaaaataataattcttagggtgttaaaatgattcaatgggaaaggcacttgcttccaaagctcccaacctgagtgtgagcccacccagaacccacactcacagacagacagatacacagacacagagacagacacacagggacagacagataacagaagacagactgagagatagacagaaagacaaacagacacagagacagacagacagacagaagaatttaatcctacctaatcttttgggattcagtgaaatgctttatggtgctaatgttgtgtgaggcctctgttgtaatgtgttaaattattctccccgtgctgtttgagagaacgaaatgcatgtcctttctgtttatgttttccccaccagagagatgaggaggatggcggtgatatggatagttatcaggtattgccaccgctgtcaatcccgtgcatggggcacagctctcgctaatcatcagccttcgcaaagcagaggccaaggaggtggggacagggccacagagtgagagcatgtggtttctcacttgcttttggtttgcttcttatgtgatcaaggacacaatattattctcccgattttccagttccaaatctgtaagcagacgctgcactgttcactctgccggctccagtgcccagctagtagagccttgccaagcgagactgtgtggctgtattatgatgaatgacctcaaaaagcacactgcttcctgttcacagcctcctggtccactcttgtctgtcctccataaagtccactttgcctctcccttctggaagatgaacgttactctgaatgccagttgacctttaaaaagcacttttattgggcaccaggcttggagactacgtacagacctttgttttgttttattaaccagtttcctctcgttggggtcaagcttagttcaccatgttgagagtttaaatagcagctttctcttgttggacgtggagaagaggtgggtgagcagatgtgacatagataatatacccaggcagcctcagctagcccggcaaccacagaggatggtgggggcgtgatcaaagcagctggcagagatgaaagtttcaggcatgatttcccagtctttgtactgccttcccactcgggtggaaagaacgggttctcggtgagccttcctgtgtgccggctgtggggactctgcaggcacggcttctgagttccatctatctactcttaactatcaggatgtccttcttagagttaggccaaggagcagtagggataaactgatgagttttcctcccctacttaaaattttactaaaaaaaggctgaaagtggacaaagccagaccttgcaggcagaaggtcagcatcctctcgggtctcagctgtgccaccaactaacaccttccagctttgggcatgcttcctgccgtgttcacagtggagtccggcggctgcttctgggatctcttctagcatggcttcctgcatgggagatgtttgattagccttgtggtgacggttggctgtgaaatctttgcagcgaagcgagttctggaggttttctgctgacctattcattgcctttcgggggaaaaaaatcatgtattaataataaggctattgaactgtgagctccataaatgcctgtcactccctacctaccatttgatgttctgcgctttgggctttgcttatggtatcctgcttgaaatcacacgtctttcagtgaatccctatcatacaaatgcacaccggcatggctgtgcatacatatagcaaaaaatcatcccgcagtgtaaaagcatcctgttttagcatcctttgagcctgtcttgtcttccagtgtaacttctgaagatccaggggctctggtttctgggtaccagcatccttggtcagcatggagcattgaacctctgctttctcacatatcaattaatcactgtgacattcaatggcttttcctaatgaaaagttccccaatctatttaaatgtcttctttaaacaaaacaagccatcgtcttcatgttctatagagaaaaaaaatctcccctctcattgtcaggaagaagacttgaattgtgtaagagagagatggtccgatgcactcattaaacgacgggaatacttagacgaacagattaaaaaagtcagcaataaaaaaggtatgtgatggggttcacaagatggctcagcagctgatgggacttgccaccaagcctcacaacaggagttcaatccccaaagcccaactggtagaaggtgggaactgactcacagccaccctctcatgtgcacatgtgctatgatgtgcttgtcccatcccccacactaaataaatgttaaaaaaaaaaaagtacatgggaataaactcttccaggagaagggtttttttcagtattttacagtagccaagaggaagaaaaaaaatgaaaaaagaatccttgtgagtcatgtgtgtggtagcttatccctttaatcccagcttttgggagacagaggcagatggatctatgtgagctgaaggtgatcatggtctccatagtgagttccaaaccagccaaggctgcataatgaaacccctgtcttcaatgaatgaatgaccaagccaaccttgtgctctggctttgacttcatggtcactcatgttataagcacatatgcacgctgctccatttcacgtcgataaaattctccttggaaaaccattcttagctcagtgagtggcgtatggttatgtttgtgtgccttgtccactgatgaaaattcagtgagtgtacctaggtgtcttagtcagggtttctattcctgcacaaacatcatgaccaagaagcaagttggggaggaaagggtttattcagtttacacttccacattgctgttcatcaccagggaagtcaggactggaactaaagcaggtcaggaagcaggagctgatgcagaggccatggagggatgttctttactggtttgcctccccaggcttgctcagcctggtctcttatagaacccaagactaccagcccagagatggtcccacccacaaggggcctttccccttgatcactaattgagaaaatgccttacagctggatctcatggaggcatttccctaactgaagctcctttcttgtgataactccagcctgtatcaaattgatacaaaactagccagtacactaggcaaccccagaattgagttaggagcatgaaggtttaaaaatgtatccagtaaatccttttcacaatgagcatgaaggaaaacaagagttttacagagcgaggtatctgagactttgaaatcgtctatctttttaacatggcttctcaccttaaaagccacaccacacccagtaatgaactggaacattctagcaagtgtgtaaagtagatatggtgtgtatttctatccccctccccagatacagctcaagtaaccccctacacacatacacagagacacatatatacacacccgaattcaacacacacagagacacacatccacacatactctcactcacacataacactcacatacacagacacacactcactcacacagacacactcacacatatatacactcatacacatatatacacacatacatatatacacacacactcacacgtacctcctagtcactgcccctgttctgtgcatttcttctggcctctgctccctagagctggtgccccatcctatctcaggctttcttctggaacatgatagacatataaaccattccagacgtcccagagtgaaaatctagctgtgttaaatgtggcagttgccctttctcttgctggctgttagtcatgatctcctgtcactctacagagaaaacagaagacgacatggagcgggaagccaggctggtggagcagtgggtggggctgacagaggagaggaatgctgtgctggtgcccgcccctggcagcggaatccccggggcacctgctgactggtaaggccgctcacccttctctgtgcaggctggcagggtgctgggcattgcctgtgaccagagcgtgcagatagcttttcaggatcgactagctgcagctgagggaagggccgcccttctccagcactgactcttctctttctaacttctctgtctccttccaaaggccacctgactgggagtaaagttccatttgcattcccctgttcttttgcataaacaacttggatcctgtctcctccctctagactgagaaggaggtgtcaggacataccggaagaacacaggaaataggtcctgtttgccctggcctgtgcttaatgtgaccagtattaatgtgacagtgaccagtattaatgtgacagtgcgatgcttctcatgcttcctaagcctgggacacttttccagttcctcgggctgtggtgaccccagccataacattatctcattgctacttcctgactgtagttttgctacggttaaggatggtaaggtgggtgtttttggagatagaggtttgccatgggggtcgagacccacgggttgagaaccactgctatagagtaagcactgaagcatgatgggataggtcagtgacctgagcacccagccagtacttggtctgctcctaagaaacagcccgttgtctgtcctccagtctagaatgaaacacgtggcctggctacagtgtccagcttcagcccttgtttgttttgagtgggtacggagttagggtctcgcatatcccgtgtagcctcaaacttgataggtaaccaaggatggccttaaacctctgatccctctgcctccacctcccaagtgctggagttgtaggtattcaccaccacacccattttatacagctctggagatttcatccagggctctgtgcgtgctaggcaagtcctctgccaacgtagccacggcctcttagttgtgtttctcagactcctttctgcctttaatcctgatatgtaagtggggctgtttgtgtactgtcatgagacttagagagaatacataaagaggtttgttcccttgatatagcatatatattgtagtgcatattgtacatctacagtacctcttgggcatacttatgtaatggtagctaactctcattctcacagcagaatcatgccctaaacattcacttacatactataggggtggcaaccttatccctcacttgatgccctgtctttctgctggaggtgggctctacaggttccctgtccccactgtagggcatctcatctaaggtgcttccctttgagtcttgagagtctctcacctcacaggtctctggtatattctgaaggattctcccacctcctacttcccaaagttgcctgttcccattctttctgcaggccctcagggcttcagtccttttcctacacccaatacctgatcatgtcccctcttcctctccctgttcccttacctacccaggtccctctctccctccccccttgtgattgctttgttctccctcccaagtggaactgaggtatcctcacttgggcctttcggcttgttaacctttttgggttctgtggactttattaatcagcagaatacataacacacttattcttacgcttaaactttgctgttgaatttagggtcccacctcctggcatggaaacacacatcccggttctcttcctggatctgaacggtaagtaggcaggcactcacccatcccacgactgtcgaactcagctaagatggttgtctcctcagacttggggtattttggggcataaattgctttggcagctactgataagacaaactaggtgacagtgtggctttggtcacatgtatcagcatggcccgtggtcactggaggacagatgctcacaggaagcagccaggactttgaaaacaggaacacaaagcgtgtggtctgatatatcagtgaccagtttaaccagagattctgtgtcatgcttgacaagggctaagggattgcatgtctgcctagtgccctcagccctcaaccctcagcagtttggggaccataaatgaccttggtctcaccttgaactgagggtatagctcattaatagatcgctagcccagcatgcagaagtccgtaagttcagactattctccaccaccaccctgtacagttttgaggtctggcatcctccaagctacttgagaagccaagacaaagaagataaaagcttccaggccagccagggtaacttagagtctgtctcacagtaaaagtgtctgtgtttatgtgtgggggtggggttcagtgtagctcagcaggtagaaacacaggagcctgactacctgagcttgaccccagatgttacccagtaggagagaactaactcccaagagctgtccatgaacctgcaagtagacagtagccttcgtgtaaataaataagctcttaaggggacaggttgggtatttagcttggtggtagagcagttgcctagtgagctcagcctccaaggctgagaagggtaacagttgctcttgaatgtggaagggacagtggtcttcagggtgcgttagaagcgaagtcccgtctgtatgaactcttaggtagaattcacaggcgggaaagaaagcaggcacggtagcacacacttttaatcccagcactcaggaggcagagggaggtggatctctagcagtttgaggcctgcctgatctgcatagtgaattctaggatggccagagctgcatagcccttgtcacaaaaataattggatggatagatgatagatagatagatagatagatagatagatagatagatagatagataggtagatgcatttaatatgagtttaagtagtttaacttaatatttgaaactagaaaaaaatctgcatgtttagggaacgttatttgggtagtccgaaggtaataagactacacatgggagatgctctatcttagagggtgctcccaagggaactttttgactaatgtggttatattttaaaataataatagctattgagaatctttgagaatctatttcagtttcaggatatgaaataaaagaataaacaaaaccaggagtatcctttatctaccttatgagtatttcgaggctggggtgtagctcagtgatggagtgtctttaacctgcataagtttgaattcagtccctgaaccatcacaattttataaatcatagtgtgtgaagtaaagggggtggggcaggggctagaagaagagatctcaaggtaggatgcagaagagagggtaatggactacatgtcatgtgaaacctattgatttttaggctgatttttttcaactaataaaaaacaataaagtacaatgtggaaaaataaatttaaaaggcatattttccaatgtcactattgcttaaaagctgagtttctttgctctgttttcatcccgtgccttgaccttggtcagcggatgacctcagtgccaatgagcagctggtgggcccccatgcgtccggtgtgaactccatcctgcccaaggaacacggcagtcagtttttctacctgcccatcataaagcacagtgatgacgaggtaacttaccccgggctctctcgggtcttcacatgagcgcaggagccccaccagcctgataaacggctgtggtcagctctgggagaaggggatgcagggcattgaacaaataccaccattccaaagagacaaaggaagacatctgcatgacaacagcaagtagggttgtcttagtcagggtttctattcctgcacaaacatcatgaccaagaagcaagttggggaggaaagggtttattcagcttacacttccatactgctgttcatcaccaaggaagtcaggtctggaactcaagcaggtcaggaagcaggagctgatgcagaggccatggagggatgttctttactgacttgcatcccctggcttgctcagttgctctcttatagaacccaagactactagcctagggatggtcccacccacaaggggcctttcccccttgaccactaattgagaaaatgccttacagctggatctcatggaggcatttccccaactgaagctcctttctctgtggtaactccagcctgtgtcaagttgacacaaaactagccagcacaagggttgattgactttctctgggatgtccactgaagaggctttacttctgtcccccaactttctgctactccaaggtttcagccacagcctcctgggactcctctgtgcacgactctcttcacctgaatcgggtcacaccgcagaatgaaaggatctacctgatcgtgaagaccaccgtgcagctcagccacccggccgccatggagctagtgttgcggaagcggatcgcggccaatatttataacaagcaggtagtgatgggactgactggccatagagcatccaaaggcacagtttgtctcctctgggtcacgtcatgttttgtaaccttggtagacagcagtgaccatggtggccagatgtagaccgcagaaggaaactctagccccagactctaatcttatcacattcactggttaggatatccagtctttggggctcagcaggtaagagccctcgctgcccatataaagaatttgcttcccagtacccgtgtcaggtgacttacatccagctccaggggatctgacacccccttctgtcctcctcaggtaccccacacacgtgtacacactcacacacagacagacacacatacaaataaaatggaccttttcttgaaaaagaactacaatatttgcaggcagcagctatagctaactgtgctggtagcagctgatatgggaggcccagtcatgtcaatggcaaggcagatttctattgctttgccaaactccacgatagaggtgctgtctacaaactgacctctcagtgttcttcacactgtcctaggacagctgaataaagtgcccctgagtgctgggacaaaaggtgtgtgtcactacaccaagtggggacaaggtgttttaaaagaggtttatcacttttatatatcttttttgcacttggatactgtgaggcctgtgtgtggaggtcagaggtcagtaggctcctcccactatgtgggtcccagggatcaaactccagatgcctctattcacacaaccatcttgccaaccagagtcggatttctaggtttaatgtttggtttaggttttttgtttgttttctgcccttttctttttcttttatttagtaagttacttgagacagggtctcatcaagtagtgcagccttggcctcaaaacagtgcattcactgtgtgaccagatgaactttgaaatggaaaaaggaccctcctgcctcaacccctcacatactgggatttttagatgtgagccgccatgcccagctttttttaagttcagggttttttgtttttttttttttctgttttgttgaaaatatctattctatttgaataatttataatacttttccagttggcagaatatgaagtgttcatcttagatttgtcacacagtttaacccagcttgcctttccttttctaccagagtttcacccagagtttgaagagacgaatatcactgatcaatatatgttactcctgcggcgtgacctatgagatagtatccaatatcccaaaggtaacacctgctgctgtttcagatgccactgtgcgagtgtaaggggagcggtagctctcaacgctttgagagcacgtggagacacttccggaaacaccattcacagaaaaacagtcgcctcctttctgtgccttaggcgaccgaggagattgaggaccgggaaaccctggccctcctggcagcgcggagtgagaacgagggcactttggatggggagacatacatcgagaagtacacgcggggcgtgctgcaggtggagaatatcctgagcctggagcggctccggcaggtgcgtagctgactgtctagccctgaggatgccattgccagctttccccagctatgggcagagatgaagcagacacctctcagagttgctcagagaaggagtgcgtgggtagccatttcctcagtgaaaggactctgacaagtatgtgtgtgtgtgtggtacatgtgggtgtttgtgtgttatgtgttgtatgtatataatctgtgttgtacatgtgtggtgtttgtgtatgtggtgtggtgtatgttgtacatgtgtactgaatgtacgtgtatgtttgtgtatgtgtatgtgctatgagtgtcctgtgtgcatgtgtgnnnnnnnnnnnnnnnnnnnntatgtgggtgtgggtgtgtgatgtgtgttgtatgtgtttgtttctttgttttgataaaaggatcttgtcctagagacctgcctgcattaggactcaatatgtatactagttgggtctccagcatgtagctgtcctcctgcctctgctctcaagtgctggattatacatctgtgttgccacactaataagcccccaagtactaggttcaaatgatgtaagtacattcattatatgacttaatggtcaagattaccttgggtggaagttctgttgtaacttctttttccaaagagaaaattgaggccataagaagttacccagcaaggcagtggcctatagcccaagtagatgggctcccaaatccttatgttaagccgtattttgttactttattcttaatatttaggcatttaagttgccagactgatgtgtgatttaaagaaactcatcagagttggtggtgtgcttgcccagcatgcttgagaacctgggtctgaactctacacgacctgggcatggtggtcatgtacacttggaatcccagcatgttcgaggtggaggcaggaggctcacaagttcagttatttttggctacatgagtctagcctgacctaggctgcatgagatcctccatattaggaaataataataataataaatagtgcactagcagcagagctgagacagatgtatagcgtgtgcatgatcctttgggaccagagctcacctgactgtgctctgggtgactagagaggtgcagttggtatttttctttttctttttctttttctctttctttttctttttccttttttgaaaaagattttttaatttattttatgtgactacaatgtagctgtcttcagacacaccagaagagggagtcagatcccattacggatggttgtgagccaccatgtggttgctgggaattgaacataggacctctggaagagcagccagtgctcttaactgctgagccatctctccagtcctttggtgtttttcaaaacaatctccttttagtgtagaacatactgaaatctggacacaaaaacccaacagcatcacttcctagggtgttatttccttctttttctgcacacttgcatcaatttatagcatgtcttctgctcagcagcttttnnnnnnnnnnnnnnnnnnnnnnnnnnnnnnnnnnnnnnnnnnnnnnnnnnnnnnnnnnnnnnnnnnnnnnnnnnnnnnnnnnnnnnnnnnnnnnnnnnnnnnnnnnnnnnnnnnnnnnnnnnnnnnnnnnnnnnnnnnnnnnnnnnnnnnnnnnnnnnnnnnnnnnnnnnnnnnnnnnnnnnnnnnnnnnnnnnnnnnnnnnnnnnnnnnnnnnnnnnnnnnnnnnnnnnnnnnnnnnnnnnnnnnnnnnnnnnnnnnnnnnnnnnnnnnnnnnnnnnnnnnnnnntccttttttgttttgttgttgttttgaacacatttggtcacagtagcagtcttagaaatattgatttctctgtgtgtgtagcattgaagtggtttttacatttgtgttttctgaatcttctaaagtaaacacgtgtctgtccagtttatagccatacgagacagtctagatatctgttatctctgctttgctgtgtatttacaggctgtcacggtgaaggaagcgctttccaccaaagcgaggcacattcggagaagcctcagtacaccgaacgttcacaacgtgagtacacgctgccagggtccggctgctcaggggacttaccccaagatttgggggtggaggatctgagaccacagggggttggcgcttacatggtgggaacagagtacacagtactagaggtggggcaccccagagggcagagcctcttctagcggcagggaggtgaaagcagattagtgtaaagaccactttacagcagtgtcttcctgggcacagcagtgtcttcctgggcgcagcagtgtgaaggaatacccttcccttcctaatgtgaggactggccaaaacgtcacgcggcactcactacccagcaggtcctgaacacaatacaaacattagaagcaaataagaagaggttggatgaagccttagaccaggggttctcagccttcctaatactgcgaccctttaatacacttcctcatgctgtgctgacccccaactgcacaatttatttctgctgccacttcatactgtaattttgctactgttataaatcatagtgtaaatacctagtatgcaggatatctgatatgtggcccctgtgagagggccattcaaccttaaaggggttctatcaaacaaaaggaaatcccaggccccagcaaccacaggctgagagccaccactgcgttagtgtgtacggtgtttgccacacaagcctgtgtttggattcctggcattcctggataaaaacctgacatggtggtgtgctcttgtaaacccagtgatggggtgcagagacagggagatctctggagtgtgcaggccagccagactagccacagtggcgcattgtgagttcaaagaccctgtctcagaaaagtaaggcagaaagcaacagaaggcacctgaggtcaacctccgtcctctacgtgggtgagcgtaggcacacacgcacatgtacactcactgcactatactgacaacgtgaaataggcagcgagagactcgtgagttataaactgaaagcattctcccaggctgagggtgtaggtcagtgtaggtcacttgcctatcgtccgcatgcccagccaccatcttcaggactacagaggaagaaaagaagagatacctgcacgcttgtgtgcgcaaacacatgcataccattttgtcttcttgggtgtcttgttttgttttgaaatagggtcccattatctagccttggatagtctcaaactcacagagatcaccagactttaccacctaagtactgggactagaggtatgcaccactatgcctagctaattgaaaaaaaaaatttttttaaggcactctaccaattaactgatttatcaaggaagaccttataatacagcttaaacgtatatagaagtaactgataataaaaatatatataaccaacagttgcggaatataaatattggtacttaaatggaaatcattagctctaaaatgcctacttcactacatcccagtgagaattctagacagtacaagaaatgaaagagcaagaatattattaagaaacctaagagcactgcactaaatctttcccaggcctgctgcttggtgccggtctggggacagacagtgctatactagagcagaggaaatccagacaggtcgtttccatctgcctggggcctgtctctacaactctgccacactccctgagaatggagacagttttgaagatgctgaagctaggggtgggaacttagaacagaagatatgtctggaccagcaactccaatgctaactccacttcccacaggagtgtgggattatagtgtagcttcagaggtcgaataacgcagatgatcagtccagcggggaatggttttcttggtgttctggactctgctccagaagacgactatgtctctgcattatatatgtcttcattaaagatttaaaaaaaaagaaagaaagaaagaaacataagtgcaggagagatggctccgtagttaagagcactggctgctcttccagaggaactgggatcaattcccagcaaccacatggtggctcacaactgtctataactccagtttcaggggatctggcaccttctcagagatatacatgcaccagtgtgcataaaataaaaataaataaatcattaaaaaaaataacagtgtaaggggcttgtgagatggctcagcagaaaaaagcacaggctggctaacaaccagagatcaattcctgggacccacaaggtagaaagaaaataccaactcctacaagttgtcctctggacacacacacacacagacacacacacacacacgcgcgcgcgcgcgcgcgctcgtgcactcatgcacgcatgcacagccacagccacacagtacttgcacaataaaatgtagtgaaaatgttcagaaatgtatataacttaagaagaagagtttacaaatagatctgggtgcagcggtacactctgtaaccacagcactcagtgggccaagtcaagccagccagggctgtgtagaagtctaaaataaaaaaggagcgccgggaaagtttggcacatgcctttaatcccaaggcaggcagatttctgggttcgaggtctacagagtgagttccaggacagccagggctagacagagaaaccctgtctcgaaaaaacaaaagtaaataaaaagggaggaagcatcctgatcaatggttcgacatttatttgatgtacatgtaccccggaaccagagcataaaataagacacttgtaaagctattgttcaagggctgagtatgtgtcaaagctctagctttagataataatattaaaggagaatgccttccccaccaaaagaaatgctaagctgggtggtggtggcgcacacctttaattccagcacttgggaggcagaggcaggcagatctctgtgagtctgaggccaacctggtctacagagtgagttccagaagagccagggctacacagagaaaccctgttttgagaaagaccaaaaaaaaaaaaaaaaaaaaaaaaggaaaggaaaagaaatactaaatgagattcagttaagcagtgtcccaaatgtggaaaactttacaagaaaaatgtcaccaaagagaagcaactaacatagagtctaggaaataaactttagaaagcaagaacagggctggagagatggctcagtggttaagagcactgactgatattctagagggtctgagttcaattcccagcaaccacatggtggctcataaccatctataatgggatctgatgccctcttctagtgtgtctgaagaagctacagtagtatactcatatatataaaataaataaatacttctttttaaaaaaaaaacacaaactcaaaaaaaatttttttcttgataggactttttaagatcgtcctaaactcttcatgtatttttttttttaaggcaggagcggctagcagcttgaggccagcccaggctaccttagtgaggggctgtcccataaaacaaaaacagaacagaaagagagtaataatcttgagcccaggatgtgaggacgcagcctcagtggacagagatagcagaggacctgtctcaacatgctgcctttgggtttctagtcagtctcaccaagtaaccaagagagggtgacctcaaattcgtaatcctcttgcctcagcctccctaagaactaggatcataggtttatgccaccacacctatttcatcatactttgtaactgaaaacacaagttaacaagacagataacaagatggatcagctgataagggcacttgctgccaagcctcatgacccaggatcagtcccaggacccagagggtggaaggagaaaactcattcctgaattatcttctctgacttgcacatgcatgccatggtctacacagacagacacagacacacactcatacacaaatgtcaaataaaaaagcattttaaaatattagaagcagggctggagagatggctcagcagttaagagcactgattgctcttccaaaggttgcgagttcaaatcccagcaaccacatgatggctcacaaccatcgtaataagatctgatgccttctggggcatctgaagataactacagtgtacttgcatatcttaaataaataaatctttaaaaactatattagaagcagcctcgatagccatctgtagaaaaatggaaccagaatcattacgcaataaagcaccatgaatactaaataacatagcacctacaatgtgtaaaatatgcaaattagtactatttagtatttatctgcatatgtcctcatgtaattatagagatgtgtgtgaaagtaataagccccagtttgagagcagttgtggtgccttgtgagagaaagcaggagcaagggaagatggtccaagtctcctatccatgccaatatatttataaagtaaaaagaaaattaataggcatatgtggtgcacgcctgtgcaggaggcagaggcaggaacactgcaagtccaaggctagcaagggccagggtgaaacctgtctcagaagaaccagatgatcattagatacgtgagacatgttggtaaaatgttcgtctctcgcaggtctcctctagccggccagatctctctggcttcgatgaagacgataaggtacgtatatagtgggtatcaataccaaagttcttgagaagatactgtgtgtccaggtgtgtgtatgtgtgttaaagattttatcttatgtatgtgtttgtctccatgtatgtctgtgccgtgctttcatgcagtgcccatggagggcagaagaggaccttgggtcccctagagtgggggtgacagacggttgagagtctatttgtgggtagagcagaacccaggtctcgcgtttagccactgagccacccctccagcccctgtgcttacagcctttgctgacgtacttgagaaacttaaacttcagtccttaaagtcagcgccaacccctcagaaggtgaatgagttccaaggagagatttccctgttagagtcagcgtctgtcagccgtgtgtcaaataagcacaccctccagcttgctgtagacagccccaacttgtgctgctttccaggcaggattaggacgagaaaggtcaccttcattaaaaagtgttttagtctggtcttgagttagagggcatggtgtctagtcctttaaacccggccctcagcaggcagaggcaggcagatctctacatagtgagagcctatctcctaaaaacaaaacaaaacaaaatttcattactgtgtacaattctattaaatcttaaaatagaatgaaatgctaacaatttgttcgctctggttttagtggtatttgttttaatcatggtataatcatcattagatacatttgagatgttttgcagtaaaagtagttttaaaaaataattacagggagggggcagtgagcaggatgaaaagtgaacaagtaaaaataaagaaataaaatatatttaatatgttatgttaatatatttagtaatatatacttcatatattaattttataacatatatatatattagagtagagttgggtatagtagcacacgcctttaatcccagcacttgggcggcaaaggcatatggatctctgagtttgaggtcagaaaggactacacaaccagactctgtctcaaaaaagaaggagaaggagaaggagaaagaaaggggagaaaagtgaaaagaaactgaaatccaggctgcttttcacattttttttagagtgacttcatcgaagttgacctatatttttactttgcagggctggcccgagaaccagttagacgtgtctgactacagctccagctaccaagacgtcgcgtgctatgggactttacccagggactcacctcgcaggagcaaggaaggtagtgatggcaagattgctcttggtggtattcctttttagctggactgtgaagccaaattccacttacgcagatgctcaaaaactctcatcttaaccagagttaacccatgtccactcacgggatttctttttgctgggtgtccaacatataaaaataatagttgtgtgtatgcatatgtggtgccaggaatcaaagcgtgagcctcaggtatgctcagcacgctctctactgctgagttctctctccagccgaaaagaatactttctgtatgggatttgaaattctcaggctcattattcagttccccgtgttctgaccttgttctgagacatacgtgattcacattcaattttcttaacccgaggagtattgacctatctcatcttttttatactcaaatgtttgaaggaaacttgagtccaacacctatcacagggtcatgactgaaagcagcaatgagttagatcagggggcatcattactatgtaaacacacagtctccccgggcaatagagagtcccacagtcgatagaaacgggggtcagtgattagcttctgtcttacactttaccaagaatcaagaatcagttagcaggaactggaaagagaacagaaggagacagaggccaaacaaggcatgagatcagtatagtcttacatagccacgtagcccaaggaaaaagggatctaagagaaagtgtatataatattcgttcgaattcgtgataaatgtcagaatatacacgaatattataaagatcttaggaattcagaggtggaaagtcgtcgtcgtgagctggaattagtctgatcagaggagcttcagctggatcttgcaaagagttacggggctggagcggcagcttggtggttagagcacagactctgtcgcagaagacccaggtttgattcccagcaccagcatggctccttaaaaccatttaaaactccagtccccggggatctgacaccctttcctgacctccctgggcatcagacatgtatattgtgcatggacatacatgcagataaagcacccatgtgcataaaatagataaatcataatatttttttagaaagaaggtttggtttcttgttgctgattctctctcactcagcagccctttaatacttctttgtggctatagattttattgactctactttatcattgcatttatttcgcttatattgcataagtgtgagggagttgggggtgtatgtcacagcacacatgttgaggtcacaggacaatttgggggagtcaattctctctttccatcacctggattaaaatccactcaggttgtcaggtttggtagcaagccttatccatctctctaacctgattactccctcgtccctcagccgttgggaggctgaactaaatgcgcgcacacacatactgtttttgctgttgtatctgatagcatcatggctgcgggtgcttactttccatggctaggacaaactaccttagaaaaactcacctgagaaaggtttgtttggactcacgacttcaaaggttttgatcaagggtcggcttgcttcatgctttggagcagaggcagagcagaacaccagagtggtaaggggctataatggtgaatgcttcacacctcaagaaagaagggagagggctggagagatggctcagccattaaatataagaaagaagggagagaggagaatcctcggacaaaagctcaccattcagaggcatacgcctagtgaccctgttccctgcagctcagcccagtcagccatctgtctgcattgatgaagctagccccctcctgataccatcagtataaaagtggaattgagctggggaccaagcctgcgtaatggcctggctccctgtgcgcctgcgaccatgctcggctatctgaaaactcatgccctctttgtattcctcaggttgtccatcagagaatcctcatgccttaacagtcagcccttttaaagcgttctctcctcagccaccaaagttcttcaaacccctcatgcctgtaaaagaggagcataagaaaaggttggccctggaagccagacctctcctaagccaagaggtaaatgttcgacttctctctactgtgtggcactgcttggaatggtgcagtcttcagagagcagtggttggcagtcgagtgttggatgctgcatggaattgtgcatgcattaagccccttctcagaagcctttctctcaagcatgcagggctgtgacaggaggttttaattattgttgccacggttggcttctctgtagcaatgacgttttggtcttttgtatccttccagagagaaggaggtgcccgaaaggcattttgaaactgtaacaggcctttatgtgtccccttgttgataaaactaatgtcttgccttgccacagagtatgtgcacgcctttaagactttacctgtagtttaactctgacccgtaacattggctgctgtgtccttcacatgtaataaaagtgttgttgttgctctttctaacatgcatgtacttggtagacatgttggctgtgaccgtctcctgtgtgtgatgcatctgtgtgtcttaacctttgcagagcatgcctccatcccaggcacataaccctggctgcattgtaaccccaggaagcaatggcagcagcatgccagtagaacacagtagcaaacccgagaagaagattgtaagttctgcaatgtttctatcatatcacctggtggtgggtctgaagccctttcccaatccgccatccaaatgctttcaaagaaattaagacaggtgctgagtcctgactttacaaatgaagtgttgctcttggtaatgccgtttttgcatgagtgcaaccttgaactgtgatttttttcccctctctctctctaagtgtgctattttatttaactcctttccacatcatcttaagtttcgtagctagtggggggaagcacctttgatggctctggtcattataaagaaaagtgtaacagcaagatcagtttaactaataccaaaatctctctaatgtgtctacgcacattgcccagattctgaagttaatctacctagaggaattgcatttacttggcgtaagtaatcccgcacttagttgtgggtgtgtttgaaagctttcttgtgtggctgctaccaagatacctgtgtagtttgtagctgctctgcccagtcatccttcctcagctcgatccccccagcaccagcagcttctgtttacctacctgacaaaacattccaacctggttcttcttggcctggcttttagattggcgaatctgtgttactcagcacaagtaaggtagacctctgcctgcaaaaccttggtctccagcatggttccaaagctgcacgttctaagtgctgggaggggcggctcacacctgagatcacacgttcaaggccggcctggtctgtagagtgagcagtctccaaataaatgaataaagtgaaacaaaacctatgaaatgccagtttttcaaacaccatggttcctggttacttttcgttataagatacacctcaatttaaaaccaatttttttttctaaacctgtaggtgtggaagtctgggaagaatcatgtgatgtgatttcatggttttcactctcctgtgccttcctaggcttgagcagggggtggggggaaacccagcctgggcaagaggaagctgtttgatgtttgctgctgcctatgacccgctgtcttaagcagtgtggggagtctcattcccagggtcaggcccactcatggtgcatcagtgtgagaccgttagttgcgccatgcgctgtgcagacactaactgcatcttcagctgatgctgcagcaggccactcatctgcattcagctgatgctgcagggggccgctcatctgcattcagagaggcagttagatcatgaagcagtgactactgatcctaaccgaggggaggaagagcagccattcccttccttagccactcgtgttcctaagttctgtttgcctgctctatctagctcctcatggggaagagggtagcatgccagagactgttccttcacctgcgtggatgttaaagagccatccccacttaacctcaccatcccctctctgagtgtagaaaatcactgggtgcactaaaagggccagtggctgtgcctttacccttcagcttgtcaggatgtgtgtctgatagagccatttattttgctccaataccctccagaggctgccaggagcaccttctagtgctatccagcacgcagatgtgcagttcacacagcttgccccacagttactctcctgcctttcctttaaagagcttaaaacgaagcccatctcagcaggcagagtagaggaccgcaccagattcttttgacccaagacatcttgagcagtacttgggcactgtgtgaccaaatgcatcatgtacggctgctgagcagggttgactggtatctttttgttccgggaacaagactagagaaggctgcctctgctggccttagaggcataactgctgcgcatgcctactacgcatgcgcactgcgcttggggcggttgcactatgttctctttggcgggtcttccggaatgttttggtattctacgtggctcgcttgtttgagctgggggcttttattttcttgggaaagcttttattttatttcccctctcataaattgacataagctattcccttcctttttgtcgtcgttgttgttgttttattttgtttctttgttttctgagacggggtctcagtatggagcccaggatggtctttaacttgcaaccctcctgcctcagccacttgagtacaggatggcaggtttatgccaccaaacttggctatgactgactcttgtagcttgtgtctgatcacttaaaaagatatacaggcatatgccttatcctgtataaataagatttaaaaggggggggggggagaacaaaaaacaaacaaacaaaaaaacccagcatttttccccccaggcttttatttttatctcatatcgcggtacagggtattagacccagggcttctgccaggcgagctctctgtccctgagccatatcctttgcgctttatttttttaattgttttgaaacaaattcttgctaaatttcccaggctgtctcactgtgtagccaaggcagtccccagacttaaaattctcttgccacaacctcccaagtagttgggatatcacacgggcaccactaggagcagctttgagctcgtcttttctgaagtcatgaggcctagggaataggaataagaaagttgaccctttcccctgtatccacagtccccatctctggtcctgcacaggcaacgtggctttctcctctcatttcactgaagaaacaaaggtctgggatgattgagcaatttgccccaagtcctggttactggaagcataagacagagattcacatcctgactgcaggtctgcgctctgcctcagagccccccgggggtgagggggatgcatagctgtgctggtagccatttctggtaaccctccacaagccgactatagtgaccgcagaaattacattccctgtggaacgctccctaccaagggtccctctctttaaaaaaatcaaagtactttgtctatggataaatatcaccttcatacgttaaatggggcaaaaaataaacgcgcaaagatgagagcttcagagaagccgagcgtttgacccggtgttccgcctttgggtcaggctctaagggttgtaacctttcttttgctcgtaagccatctgtagtaagtaagggactcagttcagtgccctttaagatctggtgttaaatgagcacactgtgctatatgctatctaactaaagtccccactgtgcactgtgagccagaaacctttttttttttccctccttgaaaacatttctcaagcaaacttttagtctccttttaaatgttagaagacattgaatacttactgaggattttggttttatttcctggcataagttgtccttatcccgttagcctgattcctatttatttatttacttatttatctcctagagttcatgggtgcttcatgtttcccaactcattctcagcctttaggaataatttttacttcccaagtttgccacatttctacccatttctacacattaaactaatggtcgcttatgtcatcggcaaacaatactttagaaagatgcaagttccccagacccttaatcctcatttgcaaaattgctttttcttgtacaacaaatttttttggtgaccaattatattgggtactcttgggcttggaaaattacatttttttaagcttaaattaaaaaaaaaaaaggagtagtaaaacttgaaattcaactttcagtctaagtataatgaatacaaaaaatctaaaaaatacaggaaagggtgggtgtttgagataatctgtccagcctctgttttttgttttgttttgttttgttttcttgtttttgttttttatcagcatcacagcccagaggaagaacacgccatcccatatacatggctttttttttttggttttgcttgctttatgtcttcataatgctagtgaacaaactaggtgccttgtgtatgccaactagtcctttaccaagagagagacactcctcccagcctgtactggtcacttttctgttgctatgatagagaaccaggacccagggaacttataaaagaaatccttgacttgggtttacaattttagagagttaggatccatactggcaagacaagacagatgggcaggaagagctgagagctcacatcccagaccccaggcaggaggcagagagaacttgcttcaggtatcatgagtcttttgaaacctcagagttggcccctggtgacacactacctcctccacaaagccacacccccagcccttcccacacagtctcaccaactgaggatcaggcattcagttggatgaacctatggggactgttgacattcaaactacaacacggctgttttcaaactacaaagtcattcaaactacaaccaccagtttttaaaatacaaatgcatgatattgatttagttgtgtgtgcaagcctgtgtgtggtgtgtgtgtgtgtgtgtgtgtgtgtgtgtgtgtgtgtgtagatgagaggacagcttgcagggattagttctctcttcaccttgtgcaccccagggattgaatttaggtcctcaggcttggcagcaagcacctttacctactgagccatgtcattggccctactttgaaagaaagaaatacagataggaaggaagaaaggaaggaaggaagcaagcaagctacctaattttaaaagcatctaacaattgggatacaagggtaatagctgagtctgatggcacacacctttaatctcttccttggggaagtagagtcaggctgatctccatgagttccagaccaacctggtctatgtagcaatttcaggccagccagggctagacagtcaaacttgtctcaaaagaaaacaaacaaagaagatacaaggacaaaacgagtatgcccttgtcaaaaattttgttttgttaatttcaaaaacttttatcatttgatatttgatacttatctttaagactggtaatttttttcaagtaatttatactcactttttttgtttgtattttgtttgtttttgttttttgagacagggtttctctgtatagccctggctgtcctggaactcactctgtagaccaggctggcctcgaactcagaaacccgcctgcctctgcctccggagtgctgggattaaaggcgtgcgccaccacgcccggcttctgctcacttttcctttctttggaagggtcctaaaattaaactgagggccttgcgtgccctgaacatgtgtcactgagtgcacctcctactaaatgctttaagcctttaaaattgatttgcaagttgaagcagcaatagagagtattaatttttttttttgaactggagtttcatgtagcccaggctgttctcgaactcactatgcagcccaggctgatttcagcctcactgtctagctgcggatgccctttgacttctgatcttctaatctccagacctctgagtgcttcgtagttatgtgccaccaagcctgatttatgcaatgctagagatctatgctaggccctcactctatcaactgagctatctccccagccctattcaactatttctgaggtatttaagtctcgtaaaattatgagatgcaaaagaaaacattactataaagtccaacagatgaagtttatatttatttatgaatagctgtctgccacatttttttgctacctcccccttttctagtctaaataatagacccaccacctatgcattcttaatgaggaaggcggatgtttgggttctggctcgctacagttatctagttgttaaggttgcagtgactttttgaggaaggggaggaaatagagctatttttgaggtttctaagttagagttcaggactgtccttagaacaaggtctcaaaggcgtaccttgctaagggaaaaaccgtgaaaccatgtcccttatcactcagcatcagtattcccaaccctcaggacaaagaggcatgtagaaagagcttgttggttagtccttaaataaaaatcatctcttaatttttgcatgatgatcgtggtggctcatacctgtaatctaagcattcaacccgctaaggcaaaaggatcgccacagtgtcaaggccaggggtgggctacatagtgatttctagggttggagagatggctcagtggttaagagcactgactgctcttgtaaaggccttgagttcaaatcccagcaaccacatgatggctcacaaccatccataatgagatctgatgccctcttctggtgtgtctgaagacagctacagtgtacttacatataataataaataaatctaaaaaaaaaaaaagaatagtgatttctaggtcagtctggcaacaaagtaagacctggtttcaaaaatctaagtgtgtgtacatttttaaataaaagtgatatctgttgggtttgggggtatgtaggagattagttttaaattatttaaaaagtgtcagttatttttctacttcatataaaaaagtaccaggctgacagggaggctcaacaggtgaggtgcaggctgtcgaggctgacagcatgagtttgattcctgtgactcaatgcagaagagaaaaccaacttcctcaacttgtcctttgaccttcatacatgtgcagggacatgcaagtgtaaacacacacatacacacacacacacacacactctaaatacatacatgcatgcataactatatccacagatacattaattagttaataaataatgccttttaaagtatcattcacaatagttgtaaaataccaggctggagagacggttcagcagttcagaacacttgtggctcttatgggagacccacgctcagttcccatatggcagctcacacccacccatgaccccagggcagtcaacgtcctcttcgggcctccccaggcagcaagcactcacaaggtatacagatacacttgcaggcatacatacactcatataacgtgaaatcaatagatttaaacaaacaaattttaaatatttataaaaagcatttttaaaaccaaataaatgtatcacttgctggcagaggctgagttgacacttttgaatttaccccaatctttgccaagttcccaactacgtaacactggagaactctctttatcttcactttctatcgtccatgggttccagccaaacctctatctgcttctcatagactaagggaagcagtaattgatgagctgttagcatgttatagtggtacagtatttagtgcaacgctgagtgcagagttctgggcctttcaccagcctcataaacaatttcagaaatagtcccagataacctgaatctctgcactctgcttcggaaggttaaagattgtcagaggaaactaagaagcccactccactgcctcgggccatgcctccctggctgaggaggatgtgtgcccttcagtctagttcctagatggcctgctgatgagtgttgagtgaacccggaagaaataaacacggccctactaggcaacagtgtgttcctaatcaccagtctctgagaataagataacttattgccaaagatgacgagagctgaccagacttaagaaagagaggctgggtctggtggtacatacccataattccctgttctgagaagtagagggaggagcttccggcagtcaaggcctatccccctaacaggttcaaagccagccatgaactacataaacagaaagaaggaagggggaagggaaggaacaggggcataggatgcctttcctaacagagtgaaatatgtctcaatcagactgtggctctaaggagctaatggctggctctggcttcctttctgtaggactcggaagaggaggaaaacgagctggaagctctcagcaggaagctgatgcttacacagccttatgtgcccgtggagttcgctgacttcagtgtttacaatgccagcttggagaacagggagtggtcctcttctaaggcggacctgacagactcgagagccttggagaaagcagtgtcccgtagccctaccaccagcagcctcaccagtggctacttctcccacagtgcctccaatgccactctgtctgacatggcagtcccctccagcgacagctcagaccagcttgccgtctcgacaaaggaggtcgagtgcgccgagcccccgggaccatcacttgcaccggatgtcagaccagcttcgaatcaggagcttacagaagtaggaagaggctcagggaaggatgagacaatcgctgtgccgctggaggaaaacagtgccttacccaaggggaccccgtcaccccagagcatccctgaggaaagttccagaatgccatgcaggactgcttcatgttcagaactggatgtcggccccagcaaagatggccaccaagccagagaattctgcccaggagaggtgacgatagaacacactacaaacattttggaggaccattccttcacagagttcatgggtgtttctgatggcaaagactttgatggtttggcagattgttctgtaggggagccctccaggaggagggctctaacaaacgaaacagaccataaaggtatcccagaaagacctccagatgccgaccggctgcatcccaagatagagaacgaccaggtaatcactcccagaggcagccgttttcagtcccgctttctcagtgagcacagctcaccggataccagcccaccggaaacttctcatctcagtgagatttgcaggagagcttcctctgatgtctgtagttagcaaaccagtccgctgcagagcaagctcagccgtgctgcttagctgctgggggagaacggctctgctgtgggagtcacggcagatgcataattgacagacgagtcggtatgagactcaagtggatgaggagcggttggtcctctccggtgatcctctccggtgtttaatttttggctaactcaaagcagtctggtctaacatctaccatattttatcaactcgtggttcctctgcttattataggccccattagttttgtatcacgagaacctgagttcaggtctaccacgcccatgtaaaagccacacgtagtggtttgtctctggcactccagttcttggcagggaggcggaggagagcagagagaggcattggacctagggcctcttgaatgccaggcaaccattctaaccataagctacaattcccttgtccatatgttgattttaagaagttgccttgaaggactggagagatggcttagtggttaagaccactgactgctctttcagacgtcctgagttcaaatcccagcaaccacatagtggctcacaatcatctgtaatatgacctgatgccctcttctggggtgtctgaagtcagctatagtgtacttatataaaataaataaataaattttaaaaattaaaaaaaaaaaagaagttgtcttgacactacaagtctatctgagagctggtgacatggctgagggtaaaaactcctgatctctaaacatgagtgttggaacttgaatccccagcacccataaaaaagctgggtatggccacgtggggccttaatcccagtgttcacaggaagagactggatgtccctggagtttgctggccagctgacctgtctgaactggtgagcttcaagttcacttcttaaggcctgggggtcagtgtcctcctctggcttcctcatgcccaggcacaggaagaacacatgcatatatacatatataccgcaaagactcatacacaataatagctgtgtgaagggctaagagtggagctcctgtggtatagtgtttgcctagcatgcatgaggtctgaggttcagttccaagtacttgggggaaacaaaggaaatcagaagtcaatttggaaatgtcttctatggttttctttttaatcctggaatgactcagaacaagggttacttcccacagaacttccacccactctctgagattccataatgaattcagtctggtctgacccttcagaaagccccctggaaggtaggccctatgtgggggtggaggggtggggacatggggacaaggagcttagactcactgatctctgtattccaggaagccacagccactcggtaagggacagccatgcctctccaggtcacagcttggcagcttcgttcatcaatcccaccctgggacagtccatgctccatcttcagacagctgtgacccagctcgacctcagaccagcataggggagccctgcacttcccctccccagtgggagaagcagcactttgttccatggcgaatcacagctccctgctctttccagaaaggaagagaatctcggcttacctacgtggcagtattttcgtacaagccccctctgtgcaaagacctccacagactcaaactttattcttgtacatttttaatcagttcttcccgcagactctggagtcagtgctctgatctctttttataaataatatatattatgtatatgaattgtgtatctacggtatgtctgtccggagacatatctgcacactgaaaggcagatagatgatttgtcgaaaatcccaaggtactggactttgttacaaagcgacccagttgactgctttgacaggagcagatgagaagcatatcttatgttctgtaagaatgaggctctgaatccctctctatagaaaaggttacaggcactgttctttataaccaaagagcttccaggagactgaacgtctttgctgtccactcttgttttgtgtgagtatataatctcactccaatctggtgccatacttcccttggctaccaagccacgtgctgcccttggtccctgtcccctttcctaagcacactgagaaatcgcacagctgtaaccttcagtcttccacatagcctggtacctactgactcgatattgaccactgacatggttgggtggctgggactcctactccaccctagcagttctcacatcctgtccacctatccaagcaggtggagtgcacagggaagtgttactgcacacaacgcagcgatgtaccaagagttggggtacagccttgctggcggcttctttatcagtctatttcaggtcgctagattctcttgtggtgtgggtttgctgtttttgcctgactctggaaaaatgctgaagagaaggactaagctatcaagttcgtaggtttgcacgtcaccttgtctgagggggattaaacatcagactgctccattgtcattttttttcccccgttttggttttcaaagtatcctgcaaggagagacactgtaggaccgtggtgtggaaaattttacagatatattttatgtccttactctgtagatgcctgtacagtggacctctatgtacagctacacgtgtgttgtgaggaagtgagagagcatgtgtgcagtctgctgtacttttctggtttttaagttcttagcattggtgagggagatatgggagactctcttgacaagctgctgtttgtgtgtatagtgagctgaccggtagtattttactaccatctgtttaaaacaaaagctgtaatttatattccctatcaactttattgtatttaattggtacagatctgtgtgtgttttagaatacaaactgtctaattcagagtccaaagtgttgatcgtctgttctttgttgttgttgttgttgtttttttttttttcgagacagggtttctctgtacagtcctggctatcctggaactcactttgtagaccaggttggcctcgaactcagaaatccacctgcctctgcctcccgagtactgggactaaaggtgtgcgccaccacacccagcttgatcatctgttcttaataatgctaccatggggtgggatcagaactcagtggctaaaatgacgacctgggtttgaatcacaggacccatatttcttaaaggaaaaggaaaaggaaaagaaagagagaaagcaagccagccagtctagtatagtggtacatgcagagaggtggatcctaaggctcatgggccagcaagcttagtctaatcagtgaatcccagacctgtgagagagtctgtctcaaaatcaaagtgaacaatgtctgaggaatgatatgacgttgtcctgtaggctgcataccctcacatgaccattaggttcaggtccagttcactgtcttgtgtgcatatatacacctatgctgtgaaaaagcctgctaacatttatcaatttattgagggcttcacgtcagccagacactgccctgggtacatttgatgttcactttggataatctgatggcacaggttggtaatggagtctcagcaaggctgggtttcagcccacatatctggctggtcgattccctctgtcttctgccaggaagtatgatctggaagggctgtacttggcagagggcagatacaggacacagcagtgtgtggtgtgataatgacaggctgctgatgtaagaacaagccaggggcctttttgtctccaagtaaaccttggacctgtggacctatgctgaagatgcccttgcagagtctttgtaggaaaacagcttttttgaagtctccaggaaatggagcccaacaacaagtgctttatgtgagtttccaggagcaaatagaccaaggaaatgggaaactcacttaaatgtgtatagctaaacagtgataactcaacggtctactcgattgggagatagctcactcaggaagtacttgctgtcaaagcacaaagacccaagttcagattcccagtatccctgtaaaaagtcgagcatagcagcatttacttatgggggaaataattgtttataaaaatatctttagggctggagggatggctcagcggttaagagcaccgactgctcttccagaggtcctgagttcaatcccagcggtggctcacaaccatctgtaatgggatctgacgccctcttctggtgtgtctgaagacaactactttgtactcatatacataaaataaataaatatatctttaaaaaatatatatctttaaaattcattaagggcagacactatcttataaattataccaccccaagtcatatagagaacctcttgtgtaccatatggaagtataacctgtcaataaaaatctgacagccatccgggcgtggtggcgcacacctttaatcccagcacttgggaggcagaggcaggcggatttctgagttcgaggccagcctggtctacagagtgagttccaggacagccagggcaacacagagaaaccctgtctcggaaaaaaaaaaaaaatctgacagcctgttagctaaggcagaaaataggaggtgggagttctgataggaagagaggaactctgggatagagtcaggctcaggaaaagatctacccctaactttgaggagacagaccaatgtctgaggagattcatgaaacttagcagaggtaaccagccatgtagcactcatagaatagaagaaatgggttaattaagttgtgaactagtcagggaatgaaccaaaacttgtagcgtaggcatttcaggagttgttgtttcaggagctgtggtgcaggtgggaaagcctgccaatacaccaaacaataatgaattttaaaaggcactgttcaagcctcagaacactaaggagacaactaatcacgtatttatgtgattaaactgtatttaaaacgtaaagctttgggatagagagatggctcagcggttaagagcactgactgctcttccgaaggtcctgagttcaaatcccagcaaccagccgggcatggtggcacacacctttaatcccagcactccggaggcagaggcaggtggatctctgagtttgaggccagcctggtctacagagtgagttccaggacagccagggctacacagaaaaaccctgtctcgaaacaaaacaaaacaaaacaaaacaaaacaaaacaaacaccaccaacaagaacaacaacaataaaacaaatcccaacaaccacagggtggctcacaaccatccataacaagatctgacgctctcttctggagtatctgaagacagctacagtgtacttacatataataaataaataaatcttaaaaaaaaaagtgggggggagagtatggggaacttctgggatagcattggaaatgtaaacgaagaaaatacctaatcaaaattttttaaaaagtaaagctttctggctgtataatgaaagggtcttgaaagaagatgtgattgagcaagaattcttactgccttttggactcaacaagagtatgattctggcacacaattggataagaaacgtttctgctgtttcagcccaagcttcctatagtatcagtgacacgcatctttctgtaacatacagctcatctcccagactaagatccaagaagaagaagctaaagcatccatagtgtcacatgtgcataatcttggagcttgggaagcaggggcaggggatcacagcaactttagagtcacccaggactgcgtaggaagacatctccaaaccaaaccctactaaatctgcaatatacacagttcgtgtcaggtttttgcctagccaaaagaaagccagccagttccaacagcaagagcaccttcagcagaggtccaaagcttaccctcccctcttgcccgtagggagacaaatccaggtgtcaggaaagagcaggggcacatctgcccttccgtagagccggggcctgagtgaaagcaaaagcccaaagattaaattgaacctgcttgtccttgtctctaatcctctgagagcagggaaaggggagtagaggtttgagatccaattgtttccggagtaagacgtgtacaggtgtgatctaacttctttacacacatgctagtgcgcacaccctcagatctgagactaccactgtgtgttcttggtaaaacaattctttcccacctggaggttcagtggctgcttgtatccttgcagactgtcctcatgtagaagactgtaggttccagagtccaggctgtgcctcagtcattataaccggaaccacaggcaatagctgccatcttggagggaatctcatgctaggaatggaactctgggatactaattaatagaaaaattgtattgtatatagaatattgtattgatggggaaaaaatccagctctcatcttaaagggaataagggatagtgtattctggagccatttgagtgactgtggcctgggagcacagatttagattaccccaaatcccatgttccagcctgaaagtccttttgtgaagttttacagaacagagaaagctatcaatcaaggtaagtttaaaatactttagtgagtgaaccaaagagtcaggtacagcaagatgggggagcttttctgtcgatgcaaggtgctctccgatgacattcttagcttctgggagggtagacgccagtggtctgttaatagatttctagaaagttttctgttagtcacgggatgttggttcagactcagaggtggacaaggactgcctgtgccagagggctatcactagcccgagataaggcaactagcctttggcctggccttaggaatgttggtaactgcaacattcctaaaattctgatcagtcatccagtctctgtaggcacagcttctttaggaattctcacccgtgcttgtaagaagtaaaggttaaaaaggggagttccgaaagagtttctgagaaacgatataagcaccttggcgattaaaaacttggtttggcgttagacagagctcatggagtcttgtggaagagtcgggggatggactgaggacctgaagggacagggactccacaggaagaacaacagagtcaactaccctggacccttggggggcttccagagactgaaccaccaaccaaagagaatacatgggctggacctacaccccctcccacacacacacatatgtagcagatgtacagcttggtcttcatgtgggtcccccaacaactggaacagggtctgttcctcactctgttgcctgcctgtagatcctgtttctcctaatggggctgctttgtgtggcctcagtgggaaaggatgtgcctagtcctgcaatgaaatgagtgccagagagggcttcccccttctcagaggaggaggggaggggaggatggagaaaggaactgggggtatgggctgggaggaaaggggtgggctgtggtcaggatgttaagtgaatttttaagaagttgggtttggtttatcataatattaaccaactgaccttacagtacccctaattccttgaattgtttagatttttgtttgtttgtttgtttgtttgatacagggtctccctatgtagtcctggttgtcctggaactcacagatcctcccacatctctctcccctgggattaaagatttgaacacctggaaatggtgtgcatgacagtttaagcagttatttggagggtcatctcctgaacccctgcccaaatcaagttgtggagatattggtttcctttttatatttatatgtgtttgtgtctgcatgtatgccacagtctatgtgtggaagtctgagaacggcttgtgggaggtcacttttctccttctaccccgggtgttctgggttcaagcgcaggtcctcagtcttggtgacaaatgcctttacacaccgagcctgcttacttgcctgagattttcctgaaaacgagccaggcacgatggcttgtgcttgtaatactcacactgagatgctgaggtagaaagagcgccgtgagttgtcagcctgggatacacatgcctcgggagaactagagctacagaatgagatcttgttttaagtgacaagagacaagtgacaagctggtgtgtgccagctatggtggcacacacctttcatctcagcactcaggcacaggcaggctgatctctgagtttgaggccagcttggtctactgagcacattccaggacagctagggtaggctacatagagaaaccctttctcaaagacaagaatggggtgtggggagggggattgcatcactgatatcctagtccagtaggaagtttgaggattgatagatctaatttcctggagtctttttgtttgtttgcttgcttttttgtgggtttctctgtgtagccctggctgtctcagaacatgccccatagaccaagctggcctcaaatgcagaggtgcttctgcctctctgcctctcctctgcctctctgcctctgcctctgcctcaagtgctgggattaaaggtgtgtgccaccattgcctgccccgtttcctggatttataatcattgttttaagtgaacaaataaagctacaggcctatgtgattggttaaactaaccctccctcattgaatctgcatgatctatgcggcctgtggttaactgcaaataagacaagcttgcttagttaacaccagagttagaatattgagctacaagtgccaagctgagagaaactgcccagtaatggaggatgtgaaagctaacttccctaccacttgatctctgggctatcttgataggatatgccaatttacccacattttctgctagtccatgtgtgtgctgtgttatatacatttgtaaccactgtagaatattagtgaattatccttaggttattggctcgatgtaacaattaacatcatcttacactacttattttgtgtttgaaacaaggtttcatgtacctaggctgcctccaaactcactgtgaagccacggatggtcttgatcttctctgatcctcctgcctccacccaccaagtgctggacttatgggcatatcccaccacctcctgcgcttcaggtgctggaactcaaagccagggcatcatgcgtagtgcaaacactcgattctcaacccagcctcatcttacacagtttttatagatctagaattcagagatctgtaagtctgagaagttctgagtccagtacctcccgaggttacgattgacattagttttctggaggaatgtgtaggaggaggaggatctacttttagaatggtccacccacgtggctggcaagctgtgtttcctcaccatgcagacctctgcctagtgcttaggtgtcctcacaccacagaggtgacttcagcacaatgactgagtagcttaagagagtacacagaagtctagggtgccttttgtgaccttatgttagaaggcacatgtggtggtttggatatgcccagggagtggcactattaggaggccctgtagaagtaggtgtggccttgttggagtaggtgtgtcactgtgggcgtgggctttaagaccctcatcctagctgcctgggagtcagtcttctactaacagccttcagatgaagatgtagaactttcagctcctcctgcaccatgcctgcctagatgctgccatgttcctgccttgatgataatggactgaacctctgaacctgtaagccagccccaattaaatgttgtccttataagagttgccttagtcatggtgtctgttcacagcagtaaaatcctaactaatgggctggagagnnnnnnnnnnnnnnnnnnnnnnnnnnnnnnnnnnnnnnnnnnnnnnnnnnnnnnnnnnnnnnnnnnnnnnnnnnnnnnnnnnnnnnnnnnnnnnnnnnnnnnnnnnnnnnnnnnnnnnnnnnnnnnnnnnnnnnnnnnnnnnnnnnnnnnnnnnnnnnnnnnnnnnnnnnnnnnnnnnnnnnnnnnnnnnnnnnnnnnnnnnnnnnnnnnnnnnnnnntaagattcttaggtctgtctctgctgatggggaagactagtggactcttccttttgaagactgtaaagaacctggagacattttattatatgtaagtacactgtagctgtcttcagacactccagaagagggcgtcagatcttgttacagatggttgtgagccaccatgtggttgctgggatttgaactccggaccttcggaagagcagtcgggtgctcttacccactgagccatctcaccagcccccctggagacattttaaagccaccatctacaacactcagggttgccctctggcatgtacatacaaacacatacagacacacagacacaaacacagagagagacagaggcagaaagatacagagaaagacagaaaggagagacagagagacacacagagaaagatagagagaagagacagagagatactgaaagaagagagacagacagaaagacacacacacacacacacatacacacacacacacacagagagagagagagagagagagagagagagagagagaggcctaaaacagcacagtttttagccaagagctcactgggtgagatctactgataaaatctcgtggaagtgaaaatccctggaggctagaggtacccccggctcaccagggagtagtagtagtagcccaaagtggactgtctggtgtgaccttcttttgtcctgttagcaacagggtttatacatacacacaccccaccaacagcaacaggatcaaacatctccatctccaggtggaataaagctcaatcaacatgccttttacttagaggggaagtgcagagacccatccgcaggtccagggctggcctaagagagctccatcactcctttcaacctgtcaagtccacaatttctttagtacctccttcatctctatactaagctttcagagaaataaaagccacggcactccacttaggaggacgctctttatttataacatgcaggagagtgctctgtagacagccggcatcagttccaacacttcctgatcaatcaatcatcttgccagaggcactggcactttatctgtgttaaaggaaaagatgaggcacaagcctagagccaaatagttcttcaaatataggaagacattagcctatgtctccacctccacctcccactgagcctgaccacctcctgtcaccccaaccttggctttgttaatgtgcagtattctgatgtcacaataacactccctgggcggcaaaaacaagtcaatagacacaactggcctctgtcaatatcaacaaccatccccagggatgagtctgcccagccagggcttgggaatggttttcagttggtgtatccagcatccatttagatgggctcttacgggttccaaagcagcacaagtttcccaacctcctttggactaaaacaggtggtgtggggaggagacacagacagcctggcataccctacttagctagagtcccaggagactggtgggctcaaagtgaggagggctgatacaaccttaagcaaattaatacaagtagtctaaaaactatcttactttgaaactgagcactttgggtccatatataatttgctagagtcattttttttaagtgttaccaaagctggagtaaacgggtcatttatacctatccaggtaattttctctaagaatgaaacaatgtgtgtgtctctggggaatagtttcacatttgacattcgttctgggatggtcttgggatgctgagccataggtaatattcatatttggctcagggagtcaatgtggtgccacatatctatactcccagtgggtttatgaggctgatcaggaggttcaaggtttacccaggctacacagcaaattcaaggcctgcctcaaaaccaaaagtaaaaggggagttcagaggactctgagtttggattgcctgccactatgtgaaaagctaggagcagtggcatgtgcccattaacctagcggggacacacacacacacacacacacacacacacacacacacacacacagaagggggcctggggctcactggtcagctagtctgtctgaatcaatgagtccagaccctgtgaagaatccctgtctcaagacataaggtaggaagccctagaggaggagaactctacgcacttgtgcaggcacacatacaaacacaggcacacgccatggaggccagtgggatggctcagtgggcagaagttactcctgccgagtctgacagcctaagtttgatcatcaggacacccacggtggagagagctgatgccacaagtcaacctctgacctttatacatgttccaaggtgcatcataacacacacacacacacaatttaaaatgtgatactcttggaacacggacaggagactaagggatgatctaataaggactggaaaaaaacagctaattatagccagctctgcccacattcgtttggcctgagttgtcctttctttgaaagatggagacagacgtctcaagattctgatcccgcttagggattttttttttcccctggatgctaccccttaggaaggaatggatgaggggatgaaggagtgaaaggcaaaaaagacagaggatgtgacagagaagggagatctgctggagccatacccgtaacgaggccagaggacccggggaacagagtatatgagcaaaaacattcgagaggtttgttaaaaaacagatctcctggagttagtgaggtggttcatttggcagagtaccttcctcataagcatgaagacctgagttcaatcccaggaccaataggaaggagaaagaaaagaaaactaagcagggcggtggtggtgcacgcctttaatcccagcacttgggaggcagaggcaggtggatttctgagtttgaggccagcctggtctacaaagtgagttccaggacagtcggg

SEQ ID NO: 1627 - DNA, 6929 bp, Mus musculus
ggcggccgcgctcggggggcgcgcggctgctgctgcggcggcggcggcggcgcggcgcttgaaggggccgcgtcgggcggagcagcgcgccgccaacatgtcggatacgaaggtaaaagttgccgtccgggtccggcccatgaaccgaagagagctggaactgaacaccaagtgcgtggtggagatggaagggaaccagacggtcctgcaccctcctccttccaacactaagcagggagaaaggtgtttgcctttgattattgcttttggtccatggatgaatcgaacacaacaaaatatgctggtaagttggctgttccctctgggcttccggcctttcccgctgtgtctgttttctctaattatcccggagtttccctgtggtcaagaagtcgttttcaagtgcctcggggaaggaattctcgagaaagcctttcagggatacaatgcttgtatttttgcatatggccagacaggttctggaaagtccttttccatgatgggccacgcagagcagctgggccttatcccaaggctctgctgtgctctgtttcaaaggatcgccctggagcaaaatgagtcacagaccttcaaagtcgaggtatcgtatatggagatctataacgagaaggtccgggacctcttggaccccaaagggagcaggcagtctctgaaagtccgagagcataaggtcctggggccgtatgtcgatggtctgtctcagctggctgtcaccagctttgaggacattgagtcactgatgtctgagggaaataagtctcgaacggtagcagcgaccaacatgaatgaggagagcagccgttcccatgcggtcttcaacatcatcatcacacagacgctgtatgacctacagtctgggaactccggggagaaggtcagcaaggtgagcctggtagacctggcggggagcgagagagtgtcgaagactggagctgcgggtgagcggctgaaagaaggcagcaacattaacaaatcccttacaaccttgggattggttatatcgtcactggctgaccaggctgctggcaaaggcaaaaacaaattcgtgccttatcgagattcggtccttacttggcttcttaaggacaatttaggagggaacagccagacctctatgatagcgaccatcagcccagcagcagacaactatgaggagacactgtccacgctaagatatgcagatcgagccaagaggattgtgaaccacgctgtggtgaatgaggaccccaatgccaaggtcatccgagagcttcgagaggaagtggagaaactgagggagcagctctcgaaggctgaggccatgaaggcccccgagctaaaggagaagctcgaagagtctgagaagctgataaaggagctaacggtgacgtgggaagagaagctgaggaaaacagaagcgatcgcacaggagagacagcggcagctggaaagcatgggaatctccctggagacctctggcatcaaggtgggggacgacaagtgctacctcgtcaacctgaacgcagaccctgccctcaacgagcttctggtttactatttaaaggatcatacccgggtgggtgcagatacctctcaggacatccagctcttcggaatagggattcagcccgagcactgtgagatcgacatcgcagcggatggagacatcactctcacgcccaaagaaaatgcaaggtcctgtgtcaatggcacccttgtctgcagtactacccagctgtggcacggcgacaggatcttatggggaaacaaccacttttttagaattaacttgcctaagaggaaacggcgggactggttgaaagactttgagagagaaaccagttccgcggagcacgatctagacgctgcgagcgaggcttcctcggagccagactacaactacgagttcgcacagatggaggtcatcatgaaaacactgaacagcaatgatccagttcaaaatgtggttcaggtcctggagaagcagtacctggaagagaagcggaccgccctggaggaacagcggctcatgtacgaacgcgagctggagcagcttcgccagcagctctctcccgagaggcagccgcccagcagcgcctcagaccgtctggcctacagcagccagacagcccagcagaaggtgacccagtgggccgaggagagggatgaactctttaggcagagcttggccaagcttcgagagcagctggtgaaagccaacactttggtgagggaagccaacttcctagccgaggagatgagcaagctcactgactaccaagtgactctgcagatccctgcggccaacctcagtgccaacaggaagagaggcgcaatcgtcagcgagcccgccatccaagccaggaggaaagggaagggcacccaggtctggaccattgagaagctggagaataagctaattgatatgagagacctttaccaagaatggaaagaaaatgttcctgaggccaagaggctctatgggaagcgaggtgaccctttttatgaagcgcaggagaatcacaacctcattggtgtggctaatgtgtttttggaatgtctcttctgtgatgtgaagcttcaatatgcagtacccatcatcagccagcagggggaggttgccgggcgcctccatgtggaggtgacgcgcattacaggaaccattccagaacgcatggcggaggatgactcttcagagaactctagtgagagcgggagtcttgaagtggtcgacagcagcggcgaagtcattcaccgggtcaaaaagctgacatgcagggtgataattaaagaggcaaccgggctacccataagcctctcaaatttcgtcttctgtcagtacacgttctgggaccagtgtgagtctacagtggctgctccagtggtggacccagatgtgccctccccgcagtccaaggacgcacagtacacggtgaccttctctcactgtaaggactatgtggtgactgtcacagaagagttcctggagttcatttctgatggtgcgctggcgattgaagtgtggggccacaggtgtgctgggaacggaagccccatctgggaggtggactcgctccatgcgaagacaaggacattgcatgacaggtggaatgaagtgacccggagaatagaggtgtggatctccattctggagctgaatgagctcggggattatgccgctgtggagcttcaccaggcgaaagacgtcaacaccggcggcgtcttccaactcagacagggtcactcccgtagagtgcaggtcacagtgaaacctgtacagcactcagggacactgccactcatggttgaagccatcctatcagtatccattggctgcgtgaccgccaggtccaccaagctgcagagagggctggacagctaccaggaagaagacttgaattgtgtaagagagagatggtccgatgcactcattaaacgacgggaatacttagacgaacagattaaaaaagtcagcaataaaaaagagaaaacagaagacgacatggagcgggaagccaggctggtggagcagtgggtggggctgacagaggagaggaatgctgtgctggtgcccgcccctggcagcggaatccccggggcacctgctgactgggtcccacctcctggcatggaaacacacatcccggttctcttcctggatctgaacgcggatgacctcagtgccaatgagcagctggtgggcccccatgcgtccggtgtgaactccatcctgcccaaggaacacggcagtcagtttttctacctgcccatcataaagcacagtgatgacgaggtttcagccacagcctcctgggactcctctgtgcacgactctcttcacctgaatcgggtcacaccgcagaatgaaaggatctacctgatcgtgaagaccaccgtgcagctcagccacccggccgccatggagctagtgttgcggaagcggatcgcggccaatatttataacaagcagagtttcacccagagtttgaagagacgaatatcactgatcaatatatgttactcctgcggcgtgacctatgagatagtatccaatatcccaaaggcgaccgaggagattgaggaccgggaaaccctggccctcctggcagcgcggagtgagaacgagggcactttggatggggagacatacatcgagaagtacacgcggggcgtgctgcaggtggagaatatcctgagcctggagcggctccggcaggctgtcacggtgaaggaagcgctttccaccaaagcgaggcacattcggagaagcctcagtacaccgaacgttcacaacgtctcctctagccggccagatctctctggcttcgatgaagacgataagggctggcccgagaaccagttagacgtgtctgactacagctccagctaccaagacgtcgcgtgctatgggactttacccagggactcacctcgcaggagcaaggaaggttgtccatcagagaatcctcatgccttaacagtcagcccttttaaagcgttctctcctcagccaccaaagttcttcaaacccctcatgcctgtaaaagaggagcataagaaaaggttggccctggaagccagacctctcctaagccaagaggactcggaagaggaggaaaacgagctggaagctctcagcaggaagctgatgcttacacagccttatgtgcccgtggagttcgctgacttcagtgtttacaatgccagcttggagaacagggagtggtcctcttctaaggcggacctgacagactcgagagccttggagaaagcagtgtcccgtagccctaccaccagcagcctcaccagtggctacttctcccacagtgcctccaatgccactctgtctgacatggcagtcccctccagcgacagctcagaccagcttgccgtctcgacaaaggaggtcgagtgcgccgagcccccgggaccatcacttgcaccggatgtcagaccagcttcgaatcaggagcttacagaagtaggaagaggctcagggaaggatgagacaatcgctgtgccgctggaggaaaacagtgccttacccaaggggaccccgtcaccccagagcatccctgaggaaagttccagaatgccatgcaggactgcttcatgttcagaactggatgtcggccccagcaaagatggccaccaagccagagaattctgcccaggagaggtgacgatagaacacactacaaacattttggaggaccattccttcacagagttcatgggtgtttctgatggcaaagactttgatggtttggcagattgttctgtaggggagccctccaggaggagggctctaacaaacgaaacagaccataaaggtatcccagaaagacctccagatgccgaccggctgcatcccaagatagagaacgaccaggaagccacagccactcggtaagggacagccatgcctctccaggtcacagcttggcagcttcgttcatcaatcccaccctgggacagtccatgctccatcttcagacagctgtgacccagctcgacctcagaccagcataggggagccctgcacttcccctccccagtgggagaagcagcactttgttccatggcgaatcacagctccctgctctttccagaaaggaagagaatctcggcttacctacgtggcagtattttcgtacaagccccctctgtgcaaagacctccacagactcaaactttattcttgtacatttttaatcagttcttcccgcagactctggagtcagtgctctgatctctttttataaataatatatattatgtatatgaattgtgtatctacggtatgtctgtccggagacatatctgcacactgaaaggcagatagatgatttgtcgaaaatcccaaggtactggactttgttacaaagcgacccagttgactgctttgacaggagcagatgagaagcatatcttatgttctgtaagaatgaggctctgaatccctctctatagaaaaggttacaggcactgttctttataaccaaagagcttccaggagactgaacgtctttgctgtccactcttgttttgtgtgagtatataatctcactccaatctggtgccatacttcccttggctaccaagccacgtgctgcccttggtccctgtcccctttcctaagcacactgagaaatcgcacagctgtaaccttcagtcttccacatagcctggtacctactgactcgatattgaccactgacatggttgggtggctgggactcctactccaccctagcagttctcacatcctgtccacctatccaagcaggtggagtgcacagggaagtgttactgcacacaacgcagcgatgtaccaagagttggggtacagccttgctggcggcttctttatcagtctatttcaggtcgctagattctcttgtggtgtgggtttgctgtttttgcctgactctggaaaaatgctgaagagaaggactaagctatcaagttcgtaggtttgcacgtcaccttgtctgagggggattaaacatcagactgctccattgtcattttttttcccccgttttggttttcaaagtatcctgcaaggagagacactgtaggaccgtggtgtggaaaattttacagatatattttatgtccttactctgtagatgcctgtacagtggacctctatgtacagctacacgtgtgttgtgaggaagtgagagagcatgtgtgcagtctgctgtacttttctggtttttaagttcttagcattggtgagggagatatgggagactctcttgacaagctgctgtttgtgtgtatagtgagctgaccggtagtattttactaccatctgtttaaaacaaaagctgtaatttatattccctatcaactttattgtatttaattggtacagatctgtgtgtgttttagaatacaaactgtctaattcagagtcc

SEQ ID NO: 1628 - protein, 1785 aa, Mus musculus
AAALGGRAAAAAAAAAARRLKGPRRAEQRAANMSDTKVKVAVRVRPMNRRELELNTKCVVEMEGNQTVLHPPPSNTKQGERCLPLIIAFGPWMNRTQQNMLVSWLFPLGFRPFPLCLFSLIIPEFPCGQEVVFKCLGEGIKAFQGYNACIFAYGQTGSGKSFSMMGHAEQLGLIPRLCCALFQRIALEQNESQTFKVEVSYMEIYNEKVRDLLDPKGSRQSLKVREHKVLGPYVDGLSQLAVTSFEDIESLMSEGNKSRTVAATNMNEESSRSHAVFNIIITQTLYDLQSGNSGEKVSKVSLVDLAGSVSKTGAAGERLKEGSNINKSLTTLGLVISSLADQAAGKGKNKFVPYRDSVLTWLLKDNLGGNSQTSMIATISPAADNYEETLSTLRYADRAKRIVNHAVVNEDPNAKVIRELREEVEKLREQLSKAEAMKAPELKEKLEESEKLIKELTVTWEEKLRKTEAIAQERQRQLESMGISLETSGIKVGDDKCYLVNLNADPALNELLVYYLKDHTRVGADTSQDIQLFGIGIQPEHCEIDIAADGDITLTPKENARSCVNGTLVCSTTQLWHGDRILWGNNHFFRINLPKRKRRDWLKDFERETSSAEHDLDAASEASSEPDYNYEFAQMEVIMKTLNSNDPVQNVVQVLEKQYLEEKRTALEEQRLMYERELEQLRQQLSPERQPPSSASDRLAYSSQTAQQKVTQWAEERDELFRQSLAKLREQLVKANTLVREANFLAEEMSKLTDYQVTLQIPAANLSANRKRGAIVSEPAIQARRKGKGTQVWTIEKLENKLIDMRDLYQEWKENVPEAKRLYGKRGDPFYEAQENHNLIGVANVFLECLFCDVKLQYAVPIISQQGEVAGRLHVEVTRITGTIPERMAEDDSSENSSESGSLEVVDSSGEVIHRVKKLTCRVIIKEATGLPISLSNFVFCQYTFWDQCESTVAAPVVDPDVPSPQSKDAQYTVTFSHCKDYVVTVTEEFLEFISDGAIEVWGHRCAGNGSPIWEVDSLHAKTRTLHDRWNEVTRRIEVWISILNELGDYAAVELHQAKDVNTGGVFQLRQGHSRRVQVTVKPVQHSGTLPLMVEAILSVSIGCVTARSTKLQRGLDSYQEEDLNCVRERWSDALIKRREYLDEQIKKVSNKKEKTEDDMEREARLVEQWVGLTEERNAVLVPAPGSGIPGAPADWVPPPGMHIPVLFLDLNADDLSANEQLVGPHASGVNSILPKEHGSQFFYLPIIKHSDDEVSATASWDSSVHDSLHLNRVTPQNERIYLIVKTTVQLSHPAAMELVLRKRIAANIYNKQSFTQSLKRRISLINICCGVTYEIVSNIPKATEEIEDRETLALLAARSENEGTLDGETYIEKYTRGVLQVENILSLERLRQAVTVKEALSTKARHIRRSLSTPNVHNVSSSRPDLSGFDEDDKGWPENQLDVSDYSSSYQDVACYGTLPRDSPRRSKEGCPSENPHALTVSPFKAFSPQPPKFFKPLMPVKEEHKKRLALEARPLLSQEDSEEEENELEALSRKLMLTQPYVPVEFADFSVYNASLENREWSSSKADLTDSRALEKAVSRSPTTSSLTSGYFSHSNATLSDMAVPSSDSSDQLAVSTKEVECAEPPGPSLAPDVRPNQELTEVGRGSGKDETIAVPLEENSALPKGTPSPQSIPEESSRMPCRTASCSELDVGPSKDGHQAREFCPGEVTIEHTTNIDHSFTEFMGVSDGKDFDGLADCSVGEPSRRRALTNETDHKGIPERPPDADRLHPKIENDQEATATR

SEQ ID NO: 1629 - DNA, 243769 bp, Homo sapiens
ggattgcaggtgtgagccactgcacctggccagactgtcaaaacttttgattcttctgtttcttccctctttatcaggaacccctcctgcacccccaacaagttctgactttaatggaacctgtgttcacttagaagacaagacaatgatagctaacctctgcttggttggctatcattgggacatggaacaaggacataagcaaaggggtctgaggtggtaatttttcattatgtgtacagagaaagacaacaaaactcgtgtagagagagagaagaagaagaaattaaacacagagaatgggatgaaagaccacagagctgaaaaaaaaagaaggtagtaacttaaattcccaactttctagaccctggctacagcccttcatgagatgtggtaacttctcaaggatgtgttcttccaatgtacttctcttttcgcttcagctagtttgagttcgtctgtgtcttccaactcagtgatacgtgattaaggcattctctttctctgcttggcaaactacccgctgaacctttaagatccagctcgaatgacctctccaatgtgaagtctccctcaagatgggaattgtcacttcccaccaacctggttcacacaactgccagagtgtgtcccactttagattgcatctggctgtcctcccttgcctggaaaccccttgagggcggagaaagtgctgtttctgaattcccagcaactctcacagtacctcagatgctgccactcagtacacatttgataaatgaatggattcactggcagatggatacaaggagcttttctactttctacccatgttgtctgtagaataaaagctaaagttgacttggtcccctgcactccttaggagcagctgagttcttacaatttccaatctgaagtcttcacatatggataaatccctcaggaaaggcctatgtttcgttttggccttcttctttcttctcactttgttttagttttggctagttccaaatgattccaaggttatacaacagccagggacaatccctctctcatcacaatgtgggctggagcctagtcaagctattcctaaatgccagtccaggcatgggctacttcagaatcaggccagcccagacctcctaaacctctgcctgagggaagattctggaatctgtgctttagctggttccaaaggatggtcagccaggtgtgggatcctggggaggttatcgtgcttatgaggctggcttatgggtctgtgcattgttagagaccacagaccctattctgatcagttgcttgtcttgctcagaagagggcaagggaagagggctctgccaacctggggcacagatggatatctccatcaagagatgtgtcctgaaccttctcttcctcactattgtccctgctgttcccccgcttctgaccctcctcactgctagcttggacagtccattcccaaataattttcagtgtctgatttctctgggttcaactcttttgtatccaatacttgattagattcctaaagcacagcatttcattgttttcctgcccacgtgcttagttcctgctagtctctgctcttccacagctattcatattgaaattctattgcctgtaatcccagcactttgggaggccaacgctggcagatcacttgaggttgggagttcgagaatagcctggccaacatggtgaaaccctgtctctactaaaaatacaaaaattagccaggcgtggtggtgtgcgcctgtagtcccagctacttgggaggctgaggcagaagaatcgcttgaactcgggaggtggaggttgcagtgacacaagatcacaccactacactccagcctcggtgacagagtgagactccatctaaaaaaaaaaagaaaaaaaagaaaaaaattctatcctttcctctataacaagtgctacaacggtaagaataacaactaccacttgttgaatgtctgttacctatgtgccagccaccacaccaggcattctacatacattatctcatttaaccctcacaagaaccctgtaaaatgggcattattatacccacctgacatacaagagacccaaggcttgcatgtccaaggtaaacacagaaagtaactaacagaggctgagctgagtgccatggctcatgtctgtaatcccagcactttggaagggtgaggtgggtggatgacttgagttcaggagttcaagaccagccaacatggcaaaactctgtctctacaaaaaaatacaaaaattagctgtgtgtactggcatgcacctgtagtctcaggtactcgggaggctgaagtgggaggatcacttgagcctgggaggtcgaggttgcggtgagctgagattgtgccacggtattccagcctaggcaacagagtaagacccttcaaaaaaaaaaagagttacagaggctggaaaacaaaccacagtgggtctgacatcaaagtctgcttttcctactctgctactctgagcccaatttcctttaccccttacttttttttttttttttttggagacggagtcttgctctgtcacccaggcttgaatgcagcggtatgatctcagctcactgaaacctctgcctcctgggttcaagcaattctcctgcctcagcctcctgagtagctgagactacaggtgtgtaccaccacgcccagctaatttttgtatttttagtagagacagagtttcaccatgttggccaggctggtcttgaactcctgacctcaggtgatccacccgcctcaaactcccaacgtgctgggattataggcatgagccactgtgtgtggcctaccccttacttctgtcaaaaggattatcatcttttctatctcccataaattttgtaactcttttgtggagactacatattgcattgaactgtaaagcataatatttagtgttgtttatattgcttatattttttgtgccagaaaaatagagacgagtcaaggcaaatccattatcacccttagaaaaaccactcacgtgcacattccaattatgtaggtcggcagctttatttcggaaaacacatctgaagcagtcacagtgtggaagtgagagctgtggtttttgaagacctgcatttaaatcccaaggccatcacttcccaggtatgtgaccttgggcaagctgcttaaattgtctctttactttttaccggttagttataatgaaggatgacaataatagtttgtgcctcatagggttattgagaggattaaataatgaaactatgcttggtaagtagtcagtgtttaataaatgttatctactgttaactgttgtgaaatataaatgttcttgtaataaatggtttggagtccctccctgggggagaattctttttcccttttccattgatgcttggcttgaccgtgtgacttcctttgtccaatgaaaattgagaagggatgggtaccattcctttctttttcttttttctttttctcttttttttgagacagagtcctgctctgttgtccaagctggaatgcagtggcatgggcttggcttgctgcaacacccacctcctgggttcaagcgattgtcctgcctcagcctcccaaatactgggattacaggcgctgccaccacgcttggctaattttttgtatttttagtagagacgaggtttctccatgttagccaggttggtctaaactcctgacctcgtgatctgtccgcctcggcctcccaaagtgctgggattacaggcgtgagccaccgtgcccagccaatgtgtaccatttctgagcaaaacttgaggagctattgtgtggtctgccaccttctcctttccttctgttacaaaaccagcgttgactcagctaggggctgtttcgtcagcctaggactcagaaagaaaatgatagaagcaaaaccacaagcaggctgtgatggacaagtcatgcgtgtagggcataaagctttttgtaagccactgagattcaagcgttgttggtcaccatgtcataacttagcctaggctgactcatggttgttaaactagtttatagaaagcctcttatttaaaagtatttgactgttctatgattattctttgattctctgcagacttaagacattagcaatttttagatcagcctggcagcctgatctgctacttctgactgaaataactttggaacttagtcttacatctgaaatgggatgattccagagtccttgggatgtttgttatctatcagttgtctgccagttcctcagaacccatggtgtttccagtttctaaagtaaagctatgctaacaagctcttcctgacaaaggagcatagaccagggccctcttagtgactagtacgcatggctgtattcgttggcatatggtgatctgtgggcattgtaaggctggctgatggctgggccagagtgttctgtcaagcaagcctcaccggtctttccatacctcagccccagtccagggcctctagccaggctgggccagctctctgatgggcctttacctgtatgcagtgggcccacactctgagcttcttctcctcgctgactccagaatgggatactgtccagcatcccaaactctcctgttgtcatgatagaaaagtccttgcatccctcctgagtagctgggactacaggcacacaccaccagattgttgttgttttaagacactaaattttggtgggatttactacaacagtaaccagaacagcatgttctaggggaatggaagtcttcagaaggacatgaaagccagcctcaagtatctgaggggcttcaggtatagcaggagttagatttggaggctgggcatggtggctcatgcctgtaatcccagcgctttgggaggctgaggcaggtagatcacttgaggtcaggagtctgagaccagcgtggccaacatggcgaaaccccttctctactaaaaatacaaaaaattaaccatgtgtggtggtgtgtgcctgtaatcccagctactcgggaggctgaggcaggagaatcacttgaacctgggaggcggaggttgcagtgagccgaggttgcgccactgcactccagcctgggtgatacagccaagaccccatctcaaaaaaaaaaaaaaaaaaaaaaaaaagggagttagatttggcatgggaagcaggagaaggcagcacttctgtcactaggtggaatgcccagggatgcaaatctgattcttcatggaggcctttcctaggcgaagaacttgaggagtcccctgactgagttcagcttctcttccaatttgagcactctgtcagcggaatccaagcacggaatgggtggccgttttgggggctgttgtaaaaaggtccacaggactcccaaaggcccttcaaacgctaaaaagacataattcctaatgatgtaaggctaaactgttttgaaaaagaaatgtttagtaaacttttatttatttatttatttatttatttttgagacagagtcttactctgtcacccaggctggagtacagtggcatgatcttgactcactgcaacctcttttctccccggttcaaacaattcttatgcctcagcttcccaagtagctgggattacaggcatgtgccaccatgcccagataatttttttgtatttttagtagagacagagattcactgggttggccaggctggtcttgaactcctggactcaagtgatccgcccacctcagtctcccaaaatgctgggattataggtatgagccaccatgcccagactagtaaactcttcatagaagaggtgaggactaatctggtctttaaagttggaaagggtcaggaaagcagaaagaagagtcactctgcaaagaaccaatgggaactgtttttctaacctgtaacaccaaatgaatcatgcccctctcaccttaagacctattcttcttctcaactattcgtggtgttatgggccatcatcctcccaatccctttctcagtcacttgcaatcctttgcctccctcaatcttcacatcccattggttgctaaattgttccacttttctcgcagtaagttctgcgtctgttccttctgctccatttgtgctatcattggctttgttcatgctatcatcacctctggatgatgatatcatcacctcatctggatgactacaatagtcctctggatggatacagtgttgccaaattaattaccctgaatcaatgctctgaatatgtcaatccctggctccaaatccaaatgcttcattcagttcctattgcctttacaataaacatgaaatttcttaggcactcaaggctttcatgatctggcagagaatgagggagaaggagaaaatgagacagagaagggattgattaaattttgtatatcctcccttcctttcttccttccttccttttctttcatccttcctctctttctttatttttttgagactgagtctcaccctgttgcccaggctggagtgcagtggtacaatcatggctcactgcagccttgacctaggctttctagcaatcccccctgcttcagcctcccaagtagctgggatcacaggcacacgccatcacgcctggctaattttttattttttgtagagacagagtctccctatgttgcccaggctggtctcaaactcctgggctcaagtgatcctcccacctttgcctcccaaagtgctgagatttcaggcataagccactgcgcctggcctctgtattagtttcttaagactactgtaacaaatgaccatgaaatgggtggcataagacaacagaaatttagtgtctcagagttctggtggctagaagtcccaaatcaaggtgtcagcagagccgtgtttcctccggaggcttcctttcctcctcctagcttctggtggctcctggcaaacctcggtgttccttggcttgtggctgcatcactccaatctctgcctctgtcttcacatggtcttcctccctgtgtatccaaatccccctctcctttctctaataaagacactagtcaggccaggtgcggtggctcacacctgtaatcccaacactttgggaggccgaggtgggcagatcacctgaggtcagaagttcgagagcagcctgggcaacacagcaaaaccccatctctactaaaaatacaaacattagctgggcatgacggcacatgcctgtagtcccagctacttgggaggctgaggcaggagaatcgcttgaacctggaagtggaggttgcagtaagttgagatcgtgccactgcactccagcctgggcaacagagcgagactctgtctcaaaaaaaaaaaaaaaaaaaaagacactagtcattagatttagggaccatcctaacccagtatggcctcatcctaattttatttctgccaagaccctgtttccaaataaggtcacattcacaggtactggaggttatggcttgtacatacctttttgggagttacaaattcaaccctctacaattcccactgatagaaactaccagagcaatggcttagcatagggatggtatcttgcttgtgaaaaggtcctggataaagaatttcaggaatggtgggaggtaatattaaacagagaggttttttgtttgtttgcttgtttttgaggtggagtttggctcttgttgcccaggctgtagtgcaacggtgcgatcttggctcaccgcaacctccgcctcccaggttcaagcgattctcctgcctcagcctcccaagtagctgggattacaggcatgtgccatcacgcctggctaattttgtatttttagtggagacggggtttctccatgttggtcaggctggtctcggactcccgacctcaggtgatctgccagcctcggcctcccaaagtgctgggattacaggcgtgagccaccgtgcccagcctgagagttttttgaacaatagaataccatgcacgattaaaggataaaattttaattttgtgaaaaatcagtctggaagctggatttaggagtgattagaggaggcaaagctaggagggttaacaggatgtctcagcagcccaaaagtgaagaggtaagcacagacctagattcttagcctcagagggctggaaatttcacctctttctgagcagcagctgagagcctgtagcctaaagcctacaacagtgtttgtaacatagtagggcgctcagaacacatttgttgaacaagtgaatggacaggtaaagtgagattgcagcagcaggaatggagaggaggaaagatgcaacaggcccttcagaggtagactgagatagctggctctacaataaggtggggctgaagtatttgtccttcagtgtacacaggggactggttccaggaacatccaaaaccatgcatactcaagtcccacagtcagctctgcagaacccacaaataggaaaagttggatctctcagttttgaacctgccaaatactgtcttttcttttttctccctttttttttttgagacagggtcttgctttgttgcctaggctggagtgcagtggtgcgaacatggctcactgcagcctcaaccttccaggctcaagtgatcctcccacctcagcctctccagtaactaagactacaggcacctgccaccatgcccggctattttttaaatttttatgtttggcaagatggggtttctttacattgcccaggctggtctcgaactcctggcctcaagtgatcctcccgcctcggcctcccaaagtgttgggattacaggcgtaaggcactgtgccagagcacgaatactgtattttcaatcagattttggttgaaaaaaagccacgtgtaagtggactcgtgcagttcaaacccgtgttgttcgagggtcaagcgtagcatcacctcggttggaggcggacggacccctctcctagcacctgccgtacactgtctagcataataagtctccacgccctctcttccaccttagcgtgtgcctctgcatcatgctattcatgtttctgtgtgtcctcaacagcaccctgcacacagtaaaacctcaatgcatcttccaataagtggatttctagatttaagcaaaatcgaaagattcctggatctaaactctggatttttgacttctgtacgcttcaaaatgcctggcactcggtgagcgccccttaagcacttgttgaaccaaacagaataaatcggattcgcccagttccgccctggcagcgaggtctgcatttggcaggatgacagaatccattgctattaaattcttatgtaagagttaatggccctcccagcccacttgacatccctcccgagacaagagaggccgggaaaggaagggagagcactatttacaaacatacactgtttcggtggtggattcacagattcatttctagtctcggttcaccacagagatcttaaaataccgctgcaggctccgtgtgggacagagggggcggcgtgccgggactcggaggggaaggcctgcgcacccagcgcggcgagccgtggtccttgctgccgtcccggggctccgggtggcagcggccccagaaggcggctcgagctcacggcggtgtccgggggggggccccgcgggcgccggtgcaggcttggcctgggaggtcccctggggaaacaatgcgtcccgccccggactccagcctcccctaagcgccgcgctgctcgccgctcctctcactgccgtcccgccgctccagggggcgccgcgcgtggccgtgtccggcctctcccgagccccggcgggtgacgggcgcggaacatggcggcgcggggccccgggcagccgcgaggggccgcggcgctgcggtctcggctggggcggcgcggctagagctgcgcctgggcccgccggcgaggcctcctccccgcccgccgccgccgccgccgccgccgcgccccgccccgcgcgcccgcccctccccgggccgcggccgtgccccgcgtcgcgctcccccgggatggcccgcgcgcctcggcgctgcctctcggagctcacggcggagcggcggcggccgcgctcgaggggcgcgcggctgcagcggcggcggcgccgcgcgtgaggggccgcctaaggccgagcgggcgcggcgagcggccgggcgagcgcagccaacatgtcggataccaaggtaaaagttgccgtccgggtccggcccatgaaccgacgaggtgaggagctttccgctcttttttatttctgctcgggctgagggcgggggcaactttagaaactgcggggccgggacggcgagagcgcggccggggccggggggccggggcggaggcggcgtccgcgctggccgtggtgcccggggcgccgtctccaggctcggccgcctccagggacggagccccgctcggcgcggctggcgggcgggcgggctggaggcgcggatgctggactttgcaacgtccctttctctctgctttcagaactggaactgaacaccaagtgcgtggtggagatggaagggaatcaaacggtcctgcaccctcctccttctaacaccaaacagggagaaaggtaaagcgggttccgagagggcggctgggaggatccagcctcgcggggtcccgcaagtttgagccaggaaaatgggagtgctctttcctattgttaggaggacggcttcaagtttgtcgccggctcctgtttgaagctgttgcaagtccaagttcctctcctccctcgccccccttctcctccatctagagcggcggcaggcagggcaccctggccacagcaccagtcagctgagcccgggcgggctgcgaggcacccgggagggagagggccggatgggaccccataggtgattcgtccagcggccacattttacagacaggaaaactgaggcccgaggcgggcaggtgaccagcccacgaccttattgttcgtggaacccagtgtccgtgattcttttcatcactgcagggtttgtttcctttggcagaattgtttagggacagtgtgtctaaaatgggaggaaaaaataaagcaaaagtcttgtacgatgtagactcaggctggactagttagtatctattttagttgttgttgctgagttgagataatgcctcaatgtaatgcgcgaattttgattttcaaagaaacaaaagtagggccctgaactgtatagacactgagggatgtttaaaaaggggctgtatttactagatggcaacatatttgcatttgaaaagtggtaactgttggatccttattaattccgttctgttccatgcaacagtatgggttaatgccccaaaataatttgaatatttggcatttttctagtaagcctctgagaagaaatcggttggaattcattcaatataataatgcagtagcttgtaaatatatatatgtgaaaaaacgggagagtttacaatattaattttcattggaaatgaatatgagtttgtgtttccacgaatcacctgttgatcgatggaatacaatttagtgaatttccttcttcagagattttcactgaagagagactctgaagcagggtttgtgacattattgcttagagaagcaatgcctccattctataatgtgtggtgttcaagctcagttttgccaaatttggggaaagaaatcatgaggcgataagattggggattctttgcttttcgtgttgagcatagcagtttttatccagtttgcaaacattctgctacctttagcagattctggtggtgatattaaatagctaagctatatgtaaaatgttgtgtttaacactgaatgtagtgtttattgtacattgtactgaatgttgtctagtaatggatgtatttttagatgcatttatagcagtgtagatagtatagcatatttcatggtgatagtaagtaaactcattgagtacattaaatatttacagattaaattagatgcccatatcaccaacgaatgtcccctccccccacccccccgcaaactgcatattgtttcgggaaaaaattctgttgggtcagattcttgaaagcagtctgggggaacaggtagaatactttttagctcctgttgtgtagccgttacttgttttccttgctggcttggcacctgctccttgtcactcttaaccataagcagtgcgactgttagctactgtttaatgacatgaagtgttgtcatttgtgaagagaaacagatttgattttgtgggatttggtacaatctataactgtggacagttggttccaaatgctaagtaatcagttgatcatttttcgggctgaaccacgttagttactaatcaggatcttttaggtaaagatttgaagggtgattttgggatctattcatctgcttacttacgatagtcccttatctggagttataaaaatagcattgaaatatgggtactctcgtgttttgtccttctgacggatctaattctttgaatagcagatgagctttctgtgggattctgtcttgagtaccggtcatttcatttacagacaaactgagtagtcaacaaaacagtgctccttgtacattaggattactgtctttgcacagatgaagacaccaaatgcatttttattttcattatgcagcttggtttcatatttctccacagacttttcccttaaagtaacagtgcatttaaaaatagaaacaattcctcccttgggctctgggttgattaattgcagcagtgcttcatgctatgtttgcaattcatttctgtcattggtttttagatagtgctcagggcagggcaaaggtgaagagtagaatactgagaatgttattatttttcatatctgcaagtccaaggtttgaagtgtaagaggtctttaaatgcatattggcaaacctgtgtcaaattgagaattactgtttttctgaaagttgcaagaaattaccaatgaattagccatggatagaaattgaaggttagtgggtgaaagttttcagtcttaccagtaaaaacaagtgagaatgcattgacgtccagggaaaaaaaaaaaaaacagatggggtcagctttcattgtttccccattttacaaaaccaaagccaagactgtgtagctaggactaaaagatcagaggatctctgaggttaaagatgtttgttttgttgctgaaattctagtattgtaatacattgcataggtccaggttagtagttgatatgtatactgatcaccattctgaaacattaagacacatggatttgtttcttaaaataccattgcattgctctccaggagacatttatgaagttcagatcatttcagtaccatgctcagcataggggattcaaagatacttgtggatccagtacctacaccagagtcactcaccttggagagaaggaggagagagaggaaaaagtagttaaaatacaacgtggtaaattacgctggtgtatacttttgccatttcatgaaccacataatttcaaaattctctgtttcctctttctctccctggaggctgtgaactgcttgaaggcaggtaggtaccttatcctacttctctttgtacctcatgctcctgcatactggcacttagcaagggcttagcaaatgtgatgggagcattgaggaggggctgtggatgctacccaaggtcctgtcaacttgccaagacaggtggtgtttgtgtggtcttatggatgctgagagcataggttcacttttgcaagacgaggagagagtcctttgccaatgaaagtgaaagcatacctgcaacacattgcttctgggtgcttgtatgtgtgtgaggtgagggggtggagtaccattcagaagcaaggtagttctgggctgggtgaggtagctcacacctgtaatcccagcactttgggaggctagggtgggcggatctcttgaggccaggagtttgagaccaccctggccaacacgatgaaaccctgtctctcctaaaaatataaaaattagccgagtggtacatacctataatcccagttgcctaggagcctaaggcaggagaatcgcctgagccttggcgatggaggttgccgtgagctgagatcgtgctactgcactctcgcctgggcaacggagtgagactgcatctcaaaaaaaaaaaaaaaagcagcagcagcaagacagttttgggggtggggtgggtgtgggtgaagggatggagtggggtgaagggagcaatggaatgagaatccctaacttgctaaaaagggtgacatacacagtgaaatgtcttcctcttcacccctgctgtcatccctactttgcccatctcttcacctctcggaaaatgggtagccactgtcatttagttctcatgcctttttttccagatatatatgtgcatttttaatacaactatatacacaaataagtatttatatattttttaagaaatatctttggtagctttctttttttttttttttttgagatggagtctcgcactgtcacctgggctggagtgcagtggcgtgatctcggctcactgcaacctccgcctcctgggttcaagcgattctcctgcctcagcctcccgagtagctgggattacaggcggccaccaccacgcccagctaatttttttgtgtatttttagtagagacggggtttcactatgttggccaggctggtctcaaactcctgaccttgtaatccgcctgcctcggcctcccaaagtgctgggattacaggcgtgagccaccacgcctggccccctttggtatctttcaatatcagcatattaagacttactcattcttttttacattcagtgtgaatggtagtggtggtttttaaaatataggtggttggcttacgggtctgatccccgtgacttttaggaagtgatgctgtgctgtgaaaagaatatagtggaacttgctttctacagaagtttttgttcttaattattttatgtaagtgaattgtaaggtaagactccaaaataaagtgcatatctaacctactgtgtaaaaataaaatgttgggctaaatatgggctctcggtagaagagcatgaaagtttttagcttcctgttcattttttccatatggcaggatgaacaatacaccttgcaaatcgtgtgagggagggtcagttgaagaaagcttcctcttactaaactttgtatgtattttttagtttattcaccagcggtatccctgtctgaacatctgaaatctaaaatgctccaaatcctgggggccagacacagtggctcacatctgtaatcccagcactttgggaggccaaggcaggcagatcacctgaggtcaggagttcgagaccagcctggccaacatggtgaaaccctgtctccactaaaaaaatacaaaagttagccgagtgtggtggtgcacacctataatcccagctacttaggaggcagaggcaggagaatcacttgaacccaggaggccgaggttgcggtgagctgagatcgagccattgcactctagcctgagcaacaagagtgaaactctgtctcaaaaaaaaaaaagaatgctcagttggtaagtatataatgcatatattccaaattcaagaaaaattcaaaatccaaaacacttctggtcccaagcattttagataagggctattcagtctgtaaatattgcaagtttttatttctaagctggcttcctccgccattctgaaggcttctaggatggttccttggctcctgtgtctctgtagaccagaaatttaaatattagtgaaagtcatacataattagaaagataagtcacctaagaagcagtaatactccacattataaaatcacctgtgggactttgaattctcttttctgtgttgttattcttctctctgcccatattacagagttaattgtaagaaagcaaagaataaggccggacacagtgactcagtgactcacacctgtaatcccagcactttgggagcctgaggcaggcagatcacgaggtcaggagatcgatatcatcctggccaacattgtgaaaccccatatctactaaaatacaaaaaattagcctggcgtggtggtgtgtgactatagtcccagctactcgggaggctgaggcaggggaatgcttgaacccgggaggcgtaggtggcagtgagccgagatcatgtcactgcactccagcctggcgacagagcgagactctgtctcaaaaaaaaaaaaaaaaagaaaaaagaaaaacaaaactaaaagtaattataatgcattgtagtttagagtggttatattattttgttgacagtcaacagttaaaaatacattttacattatgaacctgtttatgtggatatgtatatttcaaaggttatgaaaaaatactcttaactgtatgcaatgtcttttattttctatccccttctgttagaattcattaaaaaaataatggctatgtcttaccgaattatttctcaacccactaatgagtcataaacttatattttgaaaaacataggtttagttagtaagagcttgggctctgggtttttgtttttttcttaacctgtatacacagtttaaattgtgaagtggtcatataatttataaaggctgtgtttaaaaaaaaaaaaaaagtccccctcttcatttctttccccagaggcaaccacttttagtggttttaattcattcttttggaatttcccaccgtatttctgaataacatgctggtaatgcttggtttttatttgctctctttgttctctttctctgctttattctcacctcacccccaaattcttcccacctgctccctattttcccaatatagtaattttggttggatcaatatttagtgttgacattatttatatgactctaccgaacattgttgacattgagctatgaattgttcaatgaattcttgtcatacaaaactttttgttttgcctggcgttaatgattgttgcttttttccctcatttttctttattttgcttttttttctgtgtacttaattactttagcatccaaactctctgccacttcccgaaatcttttttcaagactttcaaacatatcaggtgctctctagagttcctcttcttagagacatttctccttggcccttcttacgtgttctgttgtgatctggtagccctcttggcttggagcggttgcctcccaggggtttcccacaccatcattcaggggattcccttgacctgtcttctgtgtggaatctcctatttttctattttccttcccttcttcttggtttcctgcctccattttgtagagcacatccttcagtagtttcctaagaaagcatgattggaaggtgaagttttttgaaactatgaaaagtatcttaattctacctactcaccttattgatagtgtggctgtgtatcatattctactttaaagacattattccactgtcttttatctttcagtgcttctgttgagaagttatttgggtttctaatcctttggacgtgacctagtttattcccctctggaatctgttagaagttttttccctatttttgttaaatcacaacagtgggcctttttgacctggaaactcctgtctttcagttctgaaaaaaaaattattgaattagttcattaataagacctttctctttgttctctgtttttttctggaacacctcttaggacatggggtttcctgaactggtcttctgatggttttattttttctttttacttttcacttcttgtctttttgtcctaccttttgacagatttcctccactacatcttacaagccttatgtttaatccttatgtttaattttttgtttctgctatcacatttttaattttcaagaactctttttttagtctctcttttttttttttcaaaccatcttattcttgtttcttggttgtggtatcttctctgaggacattaatgataattttctccatatagtctgctttttgttttctccctaaagcacattgttttgtttgtttgttttggtatattttatgttaaggacatctctcagatataactgtatctcacctaaactctgaggtttctccagggcaaggactatacatgatttatctttgtgttctcagtgcttagattcaagaatgccccacacaccaaaagcattttgtaaattctctttgcagttactattattattaaaagcttttgtcaaatcccttttctattgaacttccaacaataaaagcaataattttctttttcttaagaacatcgatgaatgctagaattgaaggtagtagctactgtagacaactcagttacccacattcataaggatagtttgttaatacaaaaagctggaaattttttttttagatggagtctcgttctgtcgcctaggctggagtgcagtggcacaatctggactcactgcaacctctgcctcccaggttcaatcgattcttgtgcctcagccttccaagtagctgggactacaggtgtgcaccaccacgcctggctaatttttgtatttttagtaggcatggggtttcgctgcattggtcaggctgttctcaaacttccggcctcaagtggcctccaggtgcaccctccttggcctcccaaagtgctgggattacaggcgtgagccaccatacccagctggaaaattttttaaaatcatactttttgcatcactgttaaagttatttggtgtaacatttaaaaaggtgtatgccatattattatatcttttgtatcacatattttcagaatagtaccaaaatagctagtttatcatccctctacttaactcagcttccggtggtgaaatccagctagaaatagtggaaaacttgaattgtcttccattttcaataaaattgcacatgccatatactcatatttttaagaaaatttacaggaacaagtttccctcaaatagtaaacattctgcagatatcagtttattggactaatccaactaaagttaccctttctcaaatcttccctggaagaagagcagagaagatgtttatatgtttaaaatttaaagaaattttctgaatattacctgcaaaggaaacagaatagcagagaaataaacaagacattccgaaacacttggtgagattactttgtaccttggcatataagaaattcagtttattaatgtcagagctatcaacaaaggatgtaatggaaatgctaaaatttagatgaaaacaggtattaaaacaagagttgatttatgtgagatccaggagttatcttttcaaaaaagaccactctacaaaatatttctggatatttagacatgcaaatgttaagaagaaattcctccttggaaattagtttatttggtgttttaccactcaacaactaggtgaaaactaaataaaaacaaaataaagttttcacatctctttgtaaaattttatttgtgaaaaatgtataattcttgtattcgattgtagacctaagattaaaaaggaaaagtagagaggagaatcctcctagactcacaggactagaaagacctgatatttcaccagtccaagccccctcatttgattgaatccagtgttaatttcatgttactgtgagattaacaattcggtgagtcattgatcaagtaggactattttatcaaattatgcttgcagtgtacttttcatgtcaaagcgcaatcgtatcttttttaaaagttgcattgttagacactctaaaatgtttttgcacaggtaactttgtaagaaacgtgacagaaacaaaaaagaatcattgtcctaccaagcttaacaaatcagttattctgggagggaaagcattaggaaatatacctaatgtaaatgacgagttaatgggtgcagcacaccaacatggcacatgtatacaatatgtaacaaatctgcacgttgtgcacatgtatcctagaacttaaagtataatttaaaaaaattaaaaacaaataaaaacaaatcagttattcttatttttcctctacctttattttgtccttgcccatgtaatacaaatatttgctgttgcaattgtgttttgcttttctcccacttacatttcgttatgctacaaatagtcatagtcatagttttcacatttataattttaaaaattgaatagtctcttgaatttttaatcatttctatatttttgggccttacagttgtttctcttagagattacaaataagagcatcttcatgaaacattttagtgcccttggcttactagttgaaaggcatttcttctcatgattgccagcacaaaaatacatctttgcaattgtatgacaacgtgaactattctcttacattatagtgaagataaaagttgataatttccatatttaagtatgagagacgacatggtaaaaatgattttgtatgggcagtagtaacaagatgggtggtattcaaacttgaatgtgcatcagaatcacctggagggccccaccctgacatgttctgatttggtaggtctagggtggagcctgggaatgtgcatttcttttttttttttttttttttttgttgttgttttttgagacggagtctcgctctgtttcccaggctggagtgcagtggcgcagtctcggctcactgcaagctctgcttcccgggttcacgccattctcctgcctcagcctcccgagtagctggtactacaggcgcccgccaccacacccagctaatttttttatatttttagtagagacagggtttcaccatgttagccaagatggtctcgatctcctgacctcgtgatccacccaccttggcctcccaaagtgctgggattacaggtgagccaccacacccagcctcttttttttttttttttttgagatggagtcttgctctgttgcccaggatagagtgcggtggcgtgattttgagaggtgacagcgtgctggcagtcctcagagccctcgctcgctctcggcgcctcctctgcctgagctcccactttggcggcacttgagaagcccttcagcccaccgctgcactgtgggatcccctttctgggctagccgaggccagagccggctccctcagcttgcagggaggtgtggagggagaggcgcgagcgggaaccggggctgcgcgccgcgcttgcgggccagctggagttctgggtgggcgtgggcttggcgggccccgcattcggagcagccagccggccttgccggccccgggcaatgaagggcttagcacccgggccagcggctgcggagggtgtactgggtcccccagcagtgccggcccaccggcgctgcgctcgatttctcgccgggccttagctgccttacagcggggcagggctcgcgacctgcagcccgccatgcctgagcctcccacccgctccgtgggctcctgtgcagcccgagcctccctgacgagcgccggccccttctccaccgcgcccagtcccatcgaccacccaagggctgaggagtgccggcgtgagagtggcaggtagctccacctgcagccccggtgcgggatccactgggtgaagccagctgggctcctgagtctagtgaggatgtggagaagctttatgtctagctcagggactgtaaatacaccaatcggcattctgtatctagctcaaggtttgtaaacataccaatcagcaccctgtgtctagctcagggtttgtgaatgcaccaatcgacactgtatctagctactctggtggggccttggagaacctttatgtctagctcaaggattgtaaatacaccaatcggcactctgtatctagcccaaggtttgtaaacaccaattagcaccctatgtctagctcagggttcgtgaatgcaccaattgacactctgtatctagctactctggtggggccttggagaacgtttgtgtggactctgtatctagctaatctaatgaggacgtggagaacctttgtgtctagctcagggattgtaaacgcaccaatcagcgccctgtcaaaacagacctctgggctctaccaatcagcaggatgcgggtggggccagataagagaataaaagcaggctgcccgaactagcggcagtaacttgttcgcgttttgttctgtactggaagcttttttttcttttggtctttgcaatgaattatgttgctgctccctttttgggcctacattgtctttataagctgtaacgctcaccgctgaaggtctgtagcttcacttttgtaagctagcgagatcacgaacccaccaaaaggaaaaaactccagacgcgccaacttaagatttgtaatattcattgtgagggtccgcagcttcattcttgaagttagtgagaccaagaacctactaattcggaacacagtctcagctcattgcaaccttcacctcccagattcaaacaattctcctgcctgagccttccgagtagctgggattacagaaacctgccaccccgcctgctagtttttttttatttttttatttttagtagagatagggtttcactatgttggccaggctggccttaaactgctgacctcaaatgatctgccctcctctttctctcaaagttctgggattacaggtgtgaaccactgcgcccagctgggaatgtgcatttctaacaagttcccaggtgatggctgatgctggtagcttgggaccaagctttgagaactagtctagaccagcactgtccaatagaacttcctgagatgatggaaatatgctatatcttcactgtccaatgtggtagccagtagccctatgtgatcattgaatacttgacatgtggttatgatcaaggaatttaacttttattttcattgatttaaacagctatatgtggccagtgcattaagcaacatggatgtggactttggttctcaaccttagctgcaccacagaatttcctgggatgctttaaaaatagatggttgggtcccagacccagagattctcacttaattgggctgtagtgcaccttggacactaggattttttttaaaaaagcttcccaggtgtcccagttactattgttgcttaactactctaaaacttagtggtctaaaaaaaactccattttactaatacccatgaattctgtaggttaggaatctgaacagggcaaagtacatatgacgtgtctttgctccacagtgtctgggggtatagccatccaaaggtttgaccaggttgaatgcccaagacttaacgcacatggttggctgttgattctcatgtgtggccaaggttgaaaaccgttggtctagtatagtaaacgaggttcccgccgggcgcagtggctcaagcctgtaatcctagcactttgggaggccgaggtgggcagatcatgaggtcaggagttccagaccagcctggccaacatggtgacaccccatctctactaaaaatacaaaaaagccgggcatgttggcgtgtgcctgtaatcccagctactcaggaggctgaggtaggagaatcgcttgaacccgggaggtggaggttgcagtgagctgagatcacgccattgcactccagcttgggtgacagagcaagactccgtctcaaaaaaataaaaataaaaaaccaggttcctaacataaggactctctaaacagatgtatttaattaaagtgcatcttgctatttgtttttacttgaattacattagaggggaaagaattacctaacttatctaaatgcaaagtacttgcctatccttcacctgataccaacttgttagaaggcacaggttctttctaagctttctggtttgagagttgtgggctccagttccctgtttccagtcctgtaatgatgtgacaattctagcaaagccatggggaccacatccatgcagaggctccgatctgggctatggagcagcagcatggcacagtgaactgtgagacgtctgggtgccatctggttctgccactgacttggtctgcttctttgagatagctgttgatccttttgcagctaggtttcttcatctgtaaaattgagggctggactagatagtctgtaagggttttttttttctttaagttgtaatgttcagatttatcccaacggtactttgagagttgagttaaatagagtaagtaggtaacatttataggagctgaaatacattgcattttaatttacttcttggccagggtgttaggtgaactgaagaggacagggtcaccattcttgggaggtttggtttgcacgcagtagctgatacgagaatggaaggtgtcaaatgaaataaagcagcagcatgaagtcgttatcagctagctgagaatcctggattccttacagacattctacatacctcctttgcctgtgtctgcagaacattataacaaaatcatctgatttgaatcttttaattagtagtcatcttatatagttgtgttctttgtgggatccagtgatttttaagctgttcttaaaggtgtacagctgttttatgcaacaagtgtatatatgtgtgggagtggagaaatgacatttattgttggtttagaacttccttgggcatcgtgttttgtttctgaggattctgctgcaaccctaccaaactccagttcatctccaatatttcctatcttccactgtgggatgaactcaggttagtgtgtctgtgtctctggtttatgccctcttcccctttctttcaaaagcaaagtggttattgattccatggggctcttcagggtctggtctgtgggcttgatgaactggctgctgttagaagaggcttgagggaaacctctgtttgtagttcccttaggggaaaaagtttggagccttgtttttttttttttttttttttctcactctctctcaaagacaaggaacaggaaggaagcctttgaggaaagggaagctttgctctttactgttggccctttgtattgtcttggggagacactccctagactgcacacccaccacaaatgaccataaatatttctgtatctcaagctggagcctcaggaaaaccagaaagcgcaaaacgacgaactgcataggcatctgttgcgagtgttgaaaagatctgtcccggattttggaagggccacattcaataaatccacatgtagtttgttgaacagattaacaagcctttaaacatacttacattctgttctagggtttaataaaacaagtcctcagaattgatgcctttggcgcccacctattttcccagctaaagagagaatgtgtaaagatttatagctgagcttgcagttgtaattggacctttgtaaggtttttaaatgaaatactgtttttggttttgttttgcctttttgctctctacttctattcatacagttaattaaagtttagtattcactatgcaaattgtaacagggaatggttacattatgacattgagaaagatccttaaaattacttgtttcaaggataatgttttgaataaagaggaaggaggatagtagtggggaaggtttatcaagataacggtgttaaatttgagcagccttatccacttttaagcatctccttttgaatctagacttacaaagagttacagtacaaataggtaacattagcatggtaatatcgctttaagttttttgaagccttgaagtattgttggctttgatggaatagtattcttctttctaggattacagcctagtctacatttttatgatgaattatgcattggaaatagtgttcaaaaattgctggtctactgtaatcctagggacattttttttaagctctctagctagattattatttaactagttttggtttttttccctccaagagtgactgttagctgcccttgctcattggttctcagacttaaggatttttaaaaaacagtagaaataaaaatttggataaacagagagttcccagcctcttttaaatatgccgagtaatcacactaaaacaagagcaagccggacgtggtgactcactcctgtaatcccaattctttgggaggcagaggtgggaggatcgcttgggcccaggagcttgagaccagcctgggcaacatgacaaaaccccatctctacaaaaaatagaaaaattagctgggtgtggtagtagtgctcacttgtagtcccagctacttgcagggctgaaatgggaggatcacttgaatgcagaaggtctaggctgcagtgagccatgattacaccactgcactccagcctgggcgacagagtgagaccctgtgtcaaaaaaaaaggaaaaaaacaaaccgctactaaattttaatattttattataaaatagaggtcagcttaacaccagaataggagaaaggacataatctcagaatttaaaacttggatacatttaattttgtgaagtgatcacattaattatctcttttcctggaaattgatggaaataccaccatagctatgtgaactctgaactgtgaagtacagttaggtgtccctggtgtgtgcgatgtctaatagtacatcagctattggagttctgaggatcttgggtccttcaggccagatcatactaagaatcattaaaggatattttcccttaaaaattgaccagtctctgttatttgtatgtagactgaattttttgagtggtagcctacatctttgtttttgtattttgatgtattgaaataacctcaccaatctttttaaaagccgaaataaaattgaaatttgtaaaagtgttgtaaattactttgtctctgagctgcagcttttcccttggaaatctcttatttgctttttgcactgttttgatagatacctgttgagtataaataagtagttttgtaaagcactatcaagtgttgtagccaagagtgtgctctttggagacaaactgctcaggtgaatggatataaggcttttaagtggttataacctatgtctgttcagtactcctatctgagcctatcactaacatccctagaaagaattcagtaagaggattagggaaaaggaggtgcatgtcattaacactcatggccaggcctatccaggacgcagatatttaagtcaaatattgcattaagattaataaagaagggggttaggggagaaaagaaaaggaaagagaaaagaaaactacctggtaattgaagcaggcaaattgctggaagcatgtaagcgatctgaaatctagttactttcacactgccattggatctcctctctcagcatcctgatatatatatataatttttgtatttttagtagagacagggtttcaccatgttgaccaggctagtctcaaactcctggcctcaagtgatccaccgccttggcctaccaaaattttgggattacaggcatgagtcaccatgcccggcctgcttttatgtatttctatacacaaaaacttaaattgaataaatggatcaaaaactgttctaagaaagcatgcatgaatcccttatttaagaaaacacggccgggcgcggtggctcacgcctgtaatcccagcactttgggaggctgaggcgggcggatcacgaggtcaggagatcgagaccatcccagctaacacggtgaaaccctgtctctactaaaaatacaaaaaattagccgggcgtggtggcgggcgcctgtaatcccagctacttgcggggctgaggcaggataatggcgtgaacccgggaggcagagctttcagtgagccgagatcgcgccactgcactccggcctgggtgaaagagcgagactccgtctcaaaaaaaaaaaaagaaaacacaagtaaatacacaggcatttaggtttgtatggtatattttaaaactttttaaaagaaaataataaattcaaaggaaactagaatgcttctgttaaatatcctaaatatattttccaaattttagtgggtcagtaaatgaatgccaaaaaccaaaagatttcccaagtaaacagttctggggtaaaatatattcatgtaagggatgccagagaaccagatatgcaagtaaaaatatttctctattctgaattttaacagagaagccctcaagttcatcctctccaggatggtaaaccctggaacaagagtccccagcataagtatggggataataaagtcagttgcctcaggaagaaaaataaaagtatagaaacctaatattattgaacacagtgtgtcactagcttcagccagtcatttcctcagaaatcatttacgactaagtagtattggcagtctatgaatcccctatgctaactaaagcctagtaactttatatccaattaatataaatataattaagtagtacaacaaacatttagtgagtatatactatgtctaagatggcaaagggccagcccccaataactagagtacaaagcagaagatatcacgattggaggtagagcctccagccgtgtggtcaaaacttattgctctgaataaagacagtgaccagttcaatgtccgtgaagaatctgtacaaatggcttatcataccctctagactgcaaactccttgagagcagagccccttgtcttatttgtcttttgtttcttccctcttcctttctcgaagcagctggcacatgccttgtacatagtaagtgccttggatgtttcatttcctgtactgccagagctatacacccagaggtggtgtgtggtcccagactggatgagtggaccctacaccaacctgatgtagatgttttatagttgaatataatgaaagatatggatatagacttttattataagagctgtgcctaggtagatgagtctgtgggtagaaagtcctcaggttgtgtctgtcacatcactggtggttctagtgcttctagtctgggccctctgagacctctaatttctgcattaaattgttacataatgatagcctttgtgctgtcatgtggcttttgggggtaatggcagtacaaatgtagctctggacccttacagctttggctgctactgcctttggctgacaggcagaggctgtagctgcttaggactacatgagataagtaatggttggtccagccaggaggtcaccagtctttgacaaagttcacatttttaatgttcactgcacaacctatggagcagcattagctgcagattctatgcaggtaactagtggaagagaattctatcctaggcaaagttgtgaggtcgggatgtttcatttcctgtactgccagagctatacacccagaggtggtgtgtggtcccagactggatgaatggaccctacaccaacctgatgtagttgggcattcttgtgagtcagcatgagaagctgttcctcctgttgtcatagggagagaggactggagtgaaagaattgagagaaaggagaggtactggtagattgccagggcctcttcctccagctccacctggagtccattgcctgtgaatctgggacagccctgtgagtggcagggctgctggcctgcttactcttctttctcctggtgagtaagcggggatctctgggttcttctcgttctctggttcctaattggccattgggttgatgctgcagcttctgcttactcttgtggcagttttcaacatttttttgttccccactgcagcacacatgtcaaataatatgcctacgtttgtcagtcccccaggggttctcagcattgtgggcaattctcagtatgccgtccaagaatgtacattggaatggaagtcatgtgaaaatggcagtctacaggggatagctttgaacctgtttttatttatatttttaaataagccatttgcaggctttattaagcatttattaagaccttcacagactttattaagtaagcttttacagacttacttaatgagcaccttattaacaagttacttgtgatgcatctcacagtgattgtcaaacatcagcgggtcctagtcccatggttgagccttcttggttcagaaatcagagcaggaaggcagatggctcagtggctgggcagttgggagcaggaggaaacctaacactgcaggtctttcctttggagagtaaaagatggggagcagcttatacaaagttgttgctgatagcagtctgtgtgtgggggcatcatgactatggaaatggataaccaggcatctctgctcctgacacgtgcagtcttccagaaagacttcggatagttttctctgccctagagaagtttagttttccatccttgagtgattgagcataagatgagttctctctttctttattcataagaactttgtttttaatatagcttttttctaattataaatgtgatgcccattcactgttgaacactttgaaaatataagatattagaggtaaaatacagtttactcattcttttaacattgtgatgcattttcctttttctgtgcttggtagtttataccactgagtgaataactactgagtttttaagattatgaaaacacagcaattgcatattgccttgaggcggtagcactatctaaaaatttacagcactaggttcagctgaatgtttagtccaagacaaagttctgccttgttgaaattttctgttttgctttatctttaacattttccttcaccaaagtttttatctcctcggattacttttcccctgagaaagtgcataataccaaaagggaatagagtgtctactaaatcaagttaggtactgctggaatatttggtattttctttccctaattaaggaagcagtattaggagcattacctctggagtccaggttccctcagcctggacctgcacttcccagctgggtgattttgggcacgctgcttaacctcactgtgctttaatttccaacttcatgtaaaataaataatacgctttgagtatttacagcaaatactcaaaaaatgttagatatttttcttagtgtgtgttattattgttcgtgcaataataagaatcataagacagaaggatgaagctgaagtagtgagacacataatgatgttaacaataaaaacaatttttgatacatttctcaaaactatctgatgggaaggatgtggtcaagtgaatccataccgatccatgttgaaaccatcaagcactgtgttgtgttgggattagatctaggagacactctatatttattcacccctcctttcttgttagtgctcagattgtcatacttgaccattaaaagtcttctaaatcatgggttttttttttttttcagaacttttgaaagaatcctgctcactgtcaaaaaaaaaaaaaaaaaaaattcagagtcttgaatattaactgtttcaagatattaagtccctttagaggaaaaggacattagagacaaattctaatgggtatactagggtattctcatgggtactaaggttgctatgttaggccactttagagatggaaataaaaataaaataaaaaatagcacacataaaaaataacgcatacatacacataatttttatgagttgactttgacaattttcattttagccttacttttggtttgttttgagacagaatctcactctgtcacccaggctggagtgcagtgacacaatcttcgctcactgcaacctttgcctcccgggttcaagcaattctcatgcctcaacctcctcactagctggaattataggcacacgccatcacatccagctaatttttgtatttttagtagagatggggttttgccatattggccaggctggtctcaaactcctgacctcaagtgaactcctaacctcaagtgatccgcctgcctcagccacccaaagtgctgggattacaggcgtgaaccaccacgcccggccccattttagccttacttttatccaaccacctacttatttgagaaataaataaagattgtacgtctttttaattttacaagcaaataatttgatgagtttgtggttattccttaatctaaaattatgactaaagataatgtgttatctatcaccaaaaagacaaacataaattaacaaggtcaagatcaaccctgttaataaagccactggataagtaatgagatttaacatcacacatatctttattgctatgctctgaaaacatctcactaatgaagcacagttaaattgctttgttttgagtcacttgtaataatttattttccttcctgctgctaaaaagagaatggaacttttgactcagtaaaagctatgtgaaatcttgtaaggattggagaaccatttctgcatgtgaactctgagtttctctcaataattattgaaatactggttattaaaatggtctgtaggagatttgaatcatatacaacaaaagccttattcatctctacctatgatatttcatatttgaatactattcttagtaaagttctagatggtttgtatggctagatggttgtatggaaacaacacttatttatcacctaagtaaatttgcagacagaacatagctaaagattaaatatgattaggatatctaaacatgatactaagaacaattagagaaaattaatccagacttcttggaaagcttgtaaccttttcatttgggacacatgtgtttcctttgatttttaaaatcctggcccggtgcagtggctcatgccttaatctcagcgctatggggaggccaaggtgggcagatcacttgaggccaggagtttgagactagcctggccaacatggtgaaaccccatctctactaaaaatattatttaaaaaaattagctgggtgtggtggcaggcgcttgtaatccagctactcgggaggctgaggcgggagaatcgcttgaaccagggagtcagaggttgcattgggccgagatcacaccactacactccagcctggcgacagagcgagactcagtctcaaaaaaacaaaacaacaagaaaaccacaaaactttcagaattctaaaaacattgacctgggttatctgggataaaatcaaaacaactgtgaagctctactgacctaagcccatgaaaaatttgccagactagtatcatttttgtccaattgtctatgttatttcaaaaaaaaattctttaaacttctgtctttctcttcgagaaagcagcattggtgcatgcttattttgataggattccacctacactttcttcctcaccgacattttctactgtttttataaagtagataacactgacttttctactgatttttataaatttgatttacttatattttatccaatgattgggtttagtacttattttaatttttgctttctaaatatatatatatatttgagggcaatagagaataaagtacaattacttgatgtcaacctttgagaaccacagacaagatttattacaacatccttttaggccagtgaatgatcacagcttgtaaaaagtagaaacttgggcttttctgattatcagttatatttttcaagggtgtttgttttataagaattagggcgatggctacgatatgagctgctgtaagagaaggaagagagttgatggagctgatttactctaaactgaataattagttcttggctaatatactttaaaattaaccttattgagaggtgtgggtgtgtgtgggtgtgggtgttcagagacagggtctcactctgtcacccagactggagtgcagtggcatcatcatagctcactgtaaccacgaacctcctggaatcaagctatcctcctgcctgagacttccaaagtgctggaattacaagcatgacccattgtgcctagctgaggtgtaaatttatctacgataaaatgcacccattttaagggtacactttcttgagtttttacagttgcatatgcctgattaaccactatcaccattaagatatagaacatattggccaggcatggtggctcacgcccgtaatcccaacactttgggaggctgaggtgggcggatcacaaggtcaggagtatgaaaccagcttggccaacatggtggaaccctgtctctactaaaaatgcaaaaattagcagggcgtggtggcgcgtgcctgtaatcccagctacttgggagcctgaggcaggggaatcgttggaacccaggaggcggaggttgcagtaagctgcgatcacgcgcagcactccagcctaggcgacacagcaagactctgtctcaaaaaaagaaagatatagaacaaatctatcctacaaatctcaaatctcttggggcccttttgtggtcatcggtaatatatttcttcatattgtaagaccttatctatccatgttacttcacatgatgctcttctatttttatttatttattttttttgagttggagttttgctcttgttgcccaggctagagtgcaacggcacgatcttagctcactgcagcctctccctcccaggttcaagtgattctcctgcgtcagcctcccgagtagctgggactacaggcgcccgccaccatgcccagctaatttttgtatttttagtagagacggagcttcgccatgttggccaggctggtcttgaactccccacctcaggtgatccgcccacctcggcctcccaaagtgctgggattacaggcatgagccaccgcacccagcctttcacatgacactcttactccctcacctcacttccattggtcacaacatttaaagggaagcaaaattatttgatgactagacctgctggttatgtaattataatcatataggataaacaattatctttatgcactttgagtttacagtgtagtgggggaggggacagacagatctgagtctaacgggctgaatcagatgcatctgagtaagaaactttggggctggctgataacatcagtttgattctattcattgcattgtcattaataagccagaactaattggagaaataaaatttgagtcaagcatgaggaagattccaattaaatggaaaggtgtagattggctgtgttacacctccaatgtatggaagctcagaggaaagggagagagagagagaggaccacaggaatttgtctggccagagtagatataacagaagtactctgtggttgagctgcctccgggtgcctgtggatgttgtccagactcagccttacttgcacacagcccccacaccagcatcagctgttcctgagggcagggccggtacagatggttgtgtcctgccccaccctctttcaagtggagcctctctggctgctgcctcttcctggctgtgctcatctctgtggtccgtgtcatctgttccctccgttgctacttgcctgcacaaattttctcctcgctctgcttttttaacggtctcccttatgacttattgcttcttctcctcagcctttgcagcaaaagcttgaccttttatggacatttcaagcctgttcttcaatttattaccatgttttttttttctttgttttttgagacggagtctttctctgtcatctagactggagtgcactggcgcaatctcagctcgctgcaacctccacctcctgggttcaagtagttctcttgcctcagcctcccaagtagctgggattacaggcacgccccaccacgcccagctaatttttgtatttttagtagagatggggtttcaccatgttggccaggttgttcacgtgatccacgcgccttggcctcctaaagtgctgggactacaggcatgaaccaccacacccagcctattaccatattttcagtgcacctaaaataccatcaattataagacacattggtatgtaggtgccacacaaaagaaaaaccattgcccgttgaactattaaaccttgattgtcaaatgtatcccaattctgaaattttaagatgtggaaaatagacaatgttgccaaccaaacactaagcaccctagaatacagaggaacacagggcttaggtgagaataagagaagaatttgaaactagaggtaagacgcctggtgtgcgctgcagtctatgtcgttgctggaggtggacatcttacttggctggaggatcctagaagcccatgcaaacaggaaaataactgttatacaattgtatataagaagaaaacaagctagttgctcaaaaagaacatagctattctatttactaagccctgggtgaaggatctttctgtccttttagtgttatttagagaacaatatcttcaataacatctctactataaatacagtcactgggctgttttgtttaatgtcaaatttatggtagtcagttggtaaaatattaaaagttcaatttgactctacatggtccaacctaattcggggagaatataaagggcttacaatatgcttggtgcttgttgggccaattttggggtggttttaggtccctttcatgctgggacatgatttattgcctatcttaataacttatttattatcccacatcagttgctaccttccacctttggaatcccagctcctttccaggtccccttaccagcccacactagtgaagtccacctccttgccaagtccagatctcattaagctgcacatcccagtttccacttccgtattttctccagtttgaagtgctcttttagcctcctctctgcaaactcacattcattggttccttttggatgtttcagcatacgtcttcctttaagaatctttctctgacccttggcttaacattaagcccctgtaatattatgtagataattttaaccatatttttatgtacttgttaatctgctgtttaatacttttttgaactgaaagatgctacgcttcttgaaaggaggcttagtttctcctactgtggatcttgaaaggggtctagtgcagtgttcggtactcaattcgtgctcaaaaacaatgaaagaatgaatgatacgttatactgtgaattcactccttgatgacgaagtcagtaggggcttcttcccagctcatttcacttttactttgctgtttctcctgcactactatatgatagacaccacaattctttacattcctttattctgctgggaatatacctctgaggaatgacatataaaaatatttctgaaacatttaaaacccatggtccctttggatcaacttaaaaatctcacctcctcctgagagatgatgctctcgatatatcccctgggtaaaggaaggagctgccctgtaccccaaccccaactataactgatataagaggatccctctttgggtaatagtattgaaggttattaccccaaaatggtcactgatttgttagccaggctgatcacattcataaatgcatagttaatacatagaaagagatacctatttgtggggagagtttgcttagcaaaaacatcttggttttaaagtttagcagtgttatttttagttataattcatttgttaagtttagtcaacaaacattggtgcccagaggctggtccattagtgtttccagttaaggcaaaatccaaaattattttttatactcgctctctttttgctactctcaaagaatgtttacttttttttagttactaaagagtgattttccctttgactcataacctttttttatgattttaccttgttggcagatttttaactcctaaaatttccccatgggttgaggaatcacaaatgccattcaaaatgaatgcatgataaacctttttctagccaccatttggggaggacatgttaattggtgagaactgagagttttgttttttgttgttgtttttttttttttgaggtggagttttgctcttattgcccaggcttgagtggaatggcgcgatctcggctcaccacaacctccgcctcccgggttcaagcgattctcctgcctcagctcccaagtagctggtattacaggcatgcgccaccacaccaggctaattttgtatttttaggaaagacgaggtttctccatgttggtcagtctggtctcgaactcctgacttcaggtgatccgccggcctcggcctcccaaagtgctgggattacgggcgtgagccactgcgcccagccgaactgatagcttttaattgaataaggaaagctaccattagatgtccctgactttcatgtttattttgggttaatgtggaggtttaggaaatataattgaaaataatcaattctgcctgaagaggagtactctctacttgttgatacagaaggtgttgagatcattttattttagagttgtttacactgactgcctgtttctatccagtttatttttctaagaatacattctttcctctgctgctttccaacccttgactcttatgtgttcctacagagaaacatctggtgttccgagaactttatttttggtggcaatggaatattttataaaactctttttttgcattgcatctcccaaacataatgtagtgtaagtaataaagagtaatttgcaaatgtatttaaaatgcattgctttgtatgggcatggctatttttcatgcagtctctataacatagatgaggctgtctctagaagctcttatgaagcttcaggcatgatgtcagttttgcttgtcattgtatacctagcacggagtaaacattgaatgaatgataagatgtatgtagctccttaaacagtgacctatatatgacttacagtaatttttttatttagagataaatgacacagcctgggcaagatagtgagaccccatctctacaaaatataaattttaaaaaaaattagcctggcatggtgattacttgggaggctacttgggagctacgtgggaggctgaggcgggaggattgcttgagcctggaagatagaggtggcagtgagctatgattgcactactgcactctagcctgggcacagagtgagaccctgtctcaaaaaaaaaaaaaaaaaaaaaagaaaaagaaaaagacacacaaatgttagcattgtcaacatggttttataattggatttttatgtattgaataagtagtagatgaaaatcagttttgcattcggatgaatacaacaccttgacaatggattagatggaataaatggaattaaagtataagaataaatcatataattgaaatatcacattgtatattcaaggtgaagatgaagaaatggaataaaactgtcaaatttgaaacatgaggatagttgataaaagaagtaaactgctgttcaaatacatattgtctttgcgtgtcacaattcaaataacagctgtactacatctatagagaatactttttactatatatagcttctaaacgaatgttataagccacagactgtgtatttgcctatttatagatattttacttagcaatttcagttactcagaagtttgatgtatctaactagatatagtcagatgtgtgctgtccagaacaccatatgcaaacataagtattcttaaaaagcaattgggaggaacattactgctgagaggaatggacagccagagaatattttttagggaagaatttttgcaaaccccttcagtatcttttgaggaatttaggttgatttgatgatcatctagcgatagtagatgaaattaatgccaccaaagacaaattgcaattgattagaatggctggtgagtaaaaccctccttgtgcctgaggtataattgtgagtggcagcttagcagcttgtaaaggcgggtgtctattatatgagaagctttttatttctgtgtcagtttatcagactgaagctgcttcaaaagcagggtttggtgagagcttttagagacatttcaccattgaaaatgttttctgtgactgtttcctagaggaaggctggtctaaacctcaggctgttcttttaaagtgttttgaaaaagtatgtgaagtcattgtcatgttaagctttatgacaatgtgaagaggaaaaacaccaaacaactctgtctggccatgagacacatcatgtctttaaatattgtgataagcctgtgttttgcagaaaactcaaattgtgttttccctctgctctcacaccacaacaagcaacacagaagacttctgtggccaaatgtcttggggttttcccccaccaacaagcagtgaacaccagctgggtgtcctctgattcagttctgacagtgtctactcagagatagtgtcagatcccacgggttgagggctcagtcccacaagactgcccccctgttttaaacatcagtcacaagtctgggcttctggaacttctgacctaccagcttcaagttggggtttccaggaccccttctttgggtttgattaatttgctggagaggctcacagaactcaggggagcacttatatttaccagttgattatgaaggttatcttagaggatacaaataaacagccagatgaagagatacatagggcgaggtctgcaagggtccctatccctagcacaggagcttgtgtccctgtggagatggggtacaccaccctcccagcatgtgaacgagttctttttcactgtcctgtctgctgcctccatgtgctcagtgatctggaagctctccaaactttgtgcttgagggtttttatggaggtcttgttatatagacatgattgaatatggatggcataaaaaagtgggacctggtgcgatggctcacacttgtaatccctgcactttgagaggccaaggcgggcagatcacttgaggtcaggagttcgagaccagcctggccaacatggtgaaaccctgtctctactaaaaacacaggaaattagccaggcatggtggtgggtacctgcaatcccagctacttgggaggctgaggcaggagaatcacttgaacctgggaagcaaggttgcagtgagccaagattgtaccactgcactccagcctaggctacagagtgagactccgtctaaaaaaaaaaatgtgattgaacagaaaggttgtgatctcatactagtagactgagtggggaaactcagcaaggcctgtctgtgttagttccttcttggcctctctatgcagcatttcttcctccagagtatagagcaggaccctctctggaatgaggatttttttttgacccacagccagattagaggacaggagaaggtcggcgagagagaatctattccctgaggcctcctcctgagacctaaagcaccccaacattatagcaaaggactgtaacaaggggtatgggagttatgagccaggaaccatggacaaaaaccaatatatgtctatcaccataatatcacagcctaacaccacctttgctgcttaggcataacttgcctccctacctagatagtaaatctcttgcatattgggtttgtttccatcttggttgcttttgcagtgctaggcacaaagtagatgatggacaagactgctaatcagggaggaccacaaacaggtggcacttggctgcatggttgatggtctttgaaaaagtgtgcacatgctggatttttctggaccttctttgtaatggacctattgttgagtctaataacagagcagtagttaaaggcacagactctggagccagattgaaagtaaatcctagccttttcacttattactgtgtgatcctggatgagttacctgtcctctccatgcctcaacttcctcatttgtaaatgaggatgataatacctgcatcttacggatgtaaggttaaatgagctaccacttgatgagtccttagaacggagcctggcactgtgaacctaagtccgttgctttgcttgctgttcacactcaaaatgcttgactgtagatttaaagcaatgttaatagactttttaaaaattgtgcttaagatctggaaaatatggcagtcttttcaggaaaacctgtatacaagaataacagtcactattagtgtcatcatctttaaatataaaagacagtggttgatgggatgcataaatttgcatgtatttaggcaaaaatgtagatgtgtgaacacaaattggcatgaattacctgtagaggttaatgcatggaaacaaactacactgaattggtgcagccttatcctgagactctgaaaggagtcacagaaaataggaaattgccatcttatagacttagcatacagtttctttgctttagtaaaccatgactttgtcttcaatattatctcatccaaacaaccaaatcattaagattagttgcactgctgttcttaaataagacaaatttaaacccagaaatggctactttttgtattacatccaatatagtgaatgcacattgtcttatgggcacaagaaaatcacttcttcaaatatatttgtggaaattatagggaagattttacttattgtataggtaatttgtttggtcagatatccaaattggtgtgaagtggcaaaagtctacatgaagctttgccctatcagttactcaagggagcacttcacaaatgaaagaaggcagagtgggtgttgaattggtagaatagagtttgttattgttattgttatatttaaatcaaaacaggtagaaacccaggttcttggttctagtcctggcttcgctactaatagaaggatctggagtaactttaacacctgtggaaactagtgtccgtttgtacatcaaggagattagaccagatcaattctcatattcagtgattctgaatgtaaagacatgtatagtaatacttgtaggccaggtgccgtggctcacatctgtaatctcagcactttgggaggtggcggcaggaggatcgcttgagcccatgaattcaagaccaacctgggcaccagcattttttgtagagagatattccatctctacaaaaaaagtttttttaaatgagcctggtgtggtggcacacacctgtaatgccagtgctttaggaggccaaggtggaagggttacttgaggccaggagtttgagaccagcttggacaacatagcaagaccccgtctcttaaaaaaattttttttcttaattagccaggtgtgatgctgtgtgcctgtggtcccagctactcaggaggctaaggagggaggatcccttgagcctatgagtttgaggctacagtgagctatggtcgcaacactgcactccagcctggtcaagaagagtgagatcctgtctctaacaacaatataaacaataacaaaaaatccttgtaaaaatgcatgtaatagacaatttagttttgggttgtgaaaatgtcttataaaggaagatataatattgaaaagaatgtaaaatcaggttattaatatgaaaactaagaaaaatttttccagagaagcctaatattatattttaaattatgctgtgtattatacttaaaatgtaacactggtagcttatttagtcagctgttatttattgagcagctagtctaagggatgaggggatttgtgaaaaccttcaatcacctactccctaaaagggggaagatgtggtccttgagctatatgagtttattagatgttagaaaaatgctgatctgatttttttttttttttttttgagatggagtctcgctctgttgcccaggctggagtgcagtggtgccaccttggctcattgcaagcaagcccgcctcccaggttcacgccattctcctgcctcagccttcggagtagctgggactacaggtgcccgccaccacacctggctaatttttttggtatttttagcagggacagggtttcaccgtgatagccaggatggtctccatctcctgacctcgtgatctgcctgcctcggcctcccaaagtgctgggattacaggtgtgagccaccgcacccaaccgatcggattgttttaaatctgtttcgaagaaaaaaaaattttttttgaggaatgtgagcaaaattttttatttgttcatttcttgcatttgaagtactcttcagtgacatccttgacctgagattctttgccatagtcctacagcacaactgcacaattgcaaccagccactttacagagtttttcctttgtcagttttacagaagcctacctattcccctagtctcctgtcgtcatcagccttaattaggttgatttggtattcagcgcaaagggcctgcaccaacttgatatacacaggctcatcgtagttgggtgcaaacacacaaagatgggctcggtgcttgtctaaagttgccagctttgtgaattccacgtgctaggccatcctcatgtaaagcagtattaacatccatgacaccagcagcagcagtgccttcttcggccatgccggtggtttactggtgatagggaatcttcagcgcacccaagcctctgcctctgaacttggtggaggcagagaaagaacccaaggaatttctgtaatttccattacatgacatctggggctttaaagattttttttttcccctgcttttcttcctggttaagagaggagaaataataaaaaatctcctttcttcccttttactgtctaagagtaatcattcctaaaagtttggagtgtattctttgagaaagagagaatatgggtgtgtgttcaggtacccgtgtatatgtatgtatgcatatgttttgcataaataatatcatctatatgaactgttctctaacctgcttttttaacttaacagaataatgccttcctttccatgttaatagatgggtgtctacctcgttctttttaattgctatattatattatatggatgaatgataatttctttgcttaatcccctaatgatggacatttagagtgtttccaatttttcactgtaaacagtgctccagaaagcatcattaatatattcctgttatacccctgttaaccatctctcccctccggtcctctcttcttctcctcttcctctcttcccctcttcgcttcgcttctcttttttttttttggagacagtcttgctctgtcgcccaggctggagtgcagtggcgctatctcggctcactgcaagctctgcctcccgggttcgcgccactctcctgcctcagcctcctgagtagctggggctacaggcgcccaccaccacacctggctaattttttgtatttttagtagagacagtgtttcaccgtgttagccaggatggtctcaatctcctgacctcgtgatctgcctgcctcagcctcccaaagtgctgggattacaggcatgagccaccacgcccggcttttcttttcttacagagtctctccctgtcacccagactggagtgcagtgagtggtgtggtcatagctcactgtagcctcaaactcctgggctcaagggatcctccgacctcagcctcctgagtagctaagaccacagatgcgagcacactactaagccttgctaatttttaaattttttgtagaggcagaatcttgccatgttgcccagcctggtctcaaactcctggcctcaagcgatcccccaaccccagccacccgcagtgttgggtttacaggcatgagccaccacacctggccaattattttcttaatataaattatattttctttttttttttttttttgagacggagtctcgctctgtcacccaggctggagtgcagtggcgctatctcggctcatggcaagctctgccttccgggttcatgccatcttcctgcctcagcctcccgagtagctgggactacagaagcctgccaccatacctggctaatttttttgtatttttagtagagacggggtttcaccatgttaaccagcatggtctccatctcctgacctcatgatctgcccacctcggcctcccaaagtgctgagattacaggcgtgagccaccacgcccggcaaactatagtttcttaatataaattaggaaaagactatgagcatttaaattgtaaatataaattgccaaattgcttctacaaaaattgtaaataaaggtattttttggaaggctacaaaaaattcttttaagaaaaaagatttttgtaatgagtcaccaaatgtccatcaactgatgaagaatatgtgatatattcatacagtggaatttataaaatggattaaagtggtgacatgccatatataacattgatgaactttttgtaaacataacattaagtgaaataagcagtcataaggaaccatgtattgtatgattccattgatgtgaaatgtccagagcagacatattcgtggagacagaaagtagattaatggttgcctaggcttgggggaattgggggaaatggagagtgactgccgatggatatggcattttttgaggggggtattgagaatgttctgcagttgtggtgatagccacataactctgtgaatatgctaaaaatcactgaattggacacttttagtgggtaaattgtatggtatataaattatatcttaaagctgttttttttttttttttaaattgaggctggtcacagtggctcacatctctaattccagcactttgggaggccaaggcaagaggatcacttgagccgaggatttcaagaccagcctttgcaacatggcaaaaccccatctctacaaaaaatttgtttaaaattagctggacgtggtggcgcatacctgtggtcccagctactcaggagactgaggcaggaggctccagtgagctgtttgagccactgcacgccagcctgggtgacagagccagaccctgtcttcaaaaaaataaaaaattaaagtggcgtgaggtgaattgcatcagaccccacatatgaataaatggatggttggcaaagtgttatatataataagtacaattccttaggtgtccttaggtgtactactaaagtgggtttgtgatagcccatatatttagtcatttatgttcaatagtgttatattcatttgagaaattattttaagaaatttaaaattaagaaagttttaaaagtcctttagtaattagagatttctctgggtgggtggatacggttgtttctaattatcccacacatttaatcatttatgttcaatagtgttgtattttttgagaaattattttaagaaatgcaaaattaagaaagatttaaaagtcctttagtaattagagatttttctagttgggtggataagggttatttctaagtatcttttgagtattttttgtcatatatttcgttttttaggcatgattaaaagtgtatttgaggactcttagacacataaagttgaattcctcagattgagagatagttattgctttttaattttgttaagatgctcagctgttggataaataatgcttttgttaaaatcctgtggggcattcatccaacaaatggggtataagaaaggaatgtgtgtttgtgtacatgttcttctatctgttggtcctaaagagtgtaagaaggtaaatttgaccagtgaaattcataattacagagttttatttggtaatccattaataaatcattttctgaaagcacatgtctgtgagtcattatatttttaatcttcttttcctctaaccaaatatataaggtttgtgcttagatttgtttaaatcccttctggtttgtttgaactgaatcagcttgttctcagctcttcttttacttatatatgaggaagcagagatttgtaattttgtatttatggagatcaacaggaaaaatcagatactcacactctgagactctgccagatgtaatttacatttgaacaaggatttacaaaataacatggattaagttaaacaattagagcagtatgccacagactatatatcctaggaaaactatttgggtcagtagtttttgttttcaacagacccttgcattgtgagtgcccagtaaattggttgtaattaataattgtcccagtacaagtctttgtttaggaataagggagctagctaaagtaagtttgtgactgcattttgtaggaaatatgttagttaatcagtgtgttttatgaatgtgaaaatcattataattattacttttaaaaccaccaatagtgcatttgttatctcttaactctgtttagaagacctcttagtttgtcattctttaggcttaaaaactcgagttggcacttgtttttttattactgtatatgcagtataatgactgtgtagtgcaggacatttaaactgaaggcagtgaaccccctgacattaaaagtaaaagtgtgtgtatgcatatacaatttctaagagtgagacttcatgtctttgatcaaaatttcaaaggcttctgaaactctagaaaattaagaactggtgacaggtgtattttgtgatgttgtttagaagtatgtttttcttttcctttcctgtctcctctttaccccttaagagacctgcactaacaactaaatacatttagagaccctgtatgcagttaaggtctccagacagtcacagttgtttatattaaagtgctgaaatatatcagcagctacttactatttctctaatcactcagtagccagaattaaaatgttgatggtgtctttaattcatagcaggagggcttttgtggttactgtaataaatactaaacagagccttctccaaagccattggtcacatgctttgtcccactagtaattaacttatcattgagctatggtacactctggcgactttttcctaaaagatttattttgacaaaccagggcacgataaatttttctatgaaaagtgcctttttgacccagaggagactaatgcaaatttgtaatgagctatgatgtatagtggtcagcgagttttagcatctcctttgagatggtgtacattcccctctcatctgatcttatttttctttagatcatgttgtatattgtacatttgacatgtgtattcatattgaatataatgtaagaaaggcaaaagactgtttattgttagtcgaaaagtatttattagagtgtagattttgctttcaaagggcttatgctcactcgctattgcataacctgtttatactatcagtataaaaaaggaaaaaagatgtttgggccaggcgaggtggctcatgcttgtaatcttagcactttgaggggccgaaacgggtggatcatttgaggtcaggagtttgagaccagcccagcccagccaacatggtgaaaccccatctctacaaaaaatacaaaaattagccgggcatggtggtgggtgcctgtaattccagttactcgggaggctgatgcagagaatcgcttgaacctggaggcagaggtcccagtgagccgagatcacgctgctgcagtccagcctggacgacagagtgagacttgtctcaaaaaaaaaaaaaaaaaaaaaaaaagtaaatggatgttatgtggtactgtgtcaaatttgggagccaaaatgtttctcttccctgttcatgcagcataacttattttgctttagaaaagctacagtgttaagagagtgagttaacttctgtcattttttctgaagttgggagtaatttgactctgtattttattttccaaagaaaactgtgctcttttaaaacagaaatttgttcatctacagagtcttctcccaaagtgccaccacttttggtgccatgtaaaaccactcgactactcagtgacaattaactttagcctaggacactttggtaatgaatctcttcaagtcaagtctgttctgatccttcagtctggctatttcagcatcttttagtctgagaccagtcaagggagagcaagtaactcggttatgtgatttattaaaataaaaacaaaatagaatagaaaaaagtaggatagaggcattaaaagtatattctcagtattaaatgatgtttcctgtgctgagtttctagtctctccttggacaacacaattttaattttgaaaaaataagttgcaagaatagcagacttacacattttaaagctttgctgcatttgccttatcaaatatttgtggaaaaaatataatttattttttgaactctttgagagtaggtgaaatacatcatacagccctttagcccttaatacttggtgtgctttctttttttttttgagcagagttttgctcttgtcacacaggctggagcgcaatggcgcaatctcggctcactgcaacctccacttcttaggttcaagtgattctcctgcctcagcctcttgagtagctgggattacaggcacccgccaccatgcctggctaatttttttttgtatttttagtagagatagggtttcaccgtgttgcccaggctggtcggctggtctcaaactcctgacctcaggtgatccacccacctcggcctcccaaagtgctgggattacaggcgtgagctaccacgcccagctcttggtgtattttctaagactattaccaaattcaggaaatttaacaggcaacgaagttttgaacttttgaagttaagaaggaagctgaaaggaaaagtagctagccttaattattaggtattatcaaattttgctaaaataagtttattctccttatgttgatcttttaaaaatagaagtatttaaatttgctttatttaaaaaattcattgcatgtataataaagaagtatataacttatatatttggtttcaacagttaagaaaaaaatgtaagtaccttgtatcaccacccaacttgtacttttttgtctcttatatcacttattcccatttccactccttcccattgtacctgtgaaaggaaatgactatcctgaattttatatttattttccttagttttctttataatttaacaactttaatattatatttgcctggttttaatatttttgtaaatggaatgctactttttgaacttttcgtcacactttatttgctcatctgtttttaaaatagctttattgaggtataatttacatataataaaaattcacccattttaagtgtacagtttcgatgagctttgataaatgtatatacagttgtgcaaccgcctgcacagtcaactttgttcttgagattcatttgtccgtgttgatgcacgtagctgaattcacttttgctgttgcatggtattccattgtatgaatatactacagttcatcctttcattgttgatggacatttgggtagtttccagtttggggcttttatgaacagtgctgctatgaacatttggattgctggatcatagcatatgtgcatgttaaactttactatgtgcatgtaaaattgatttcctaagtagttaatatcactagtagtataagataatgacagtacttaatattatcagagtttaaaatttttactgatgcagagcatgtgaaatgatattttattgtggttttaatttgcatttcctgcataaaagtgcaacggaacatcttttcatatattttatcggccattcatttgttttcttttgaaaagcacctgctctctttttactcattttctcttttttgttttttttttggccttttaaaattgattccttggtgttacttatatattgtgtatattaatcttttgttatatgcaaaatctttttccagtttgtggattctgtttttgcttggttttatttattttctgattattagaagttctgatttttaaaatagcgaagtttaccctttacttttaagatggatgctttatcagctaaatgtggtggctcatacctgtaatcccagcactttggaaggctgaggtgggaggatcgctttgagcccaggggttcaagatcagccttggcaacaaagcaagacttcatccctattttttttaaagggttaatgctgtatgtgtcatgtttttaaaagttcttctctaagcgcatacaaatactctcttataccttctaaaagtcttaagctttacaattcacatttaaatccttgaaatttatttttttaaacagtatgaagtagagattaatttcgccccatcaagataacctattatcctggcactatttattgaatagtccagcctgatctttgatactggttctatcagactaggtttccagataactgaggatcattttcagggccgtctcttctgtttcggtgttctgtttgtctgtctctgaggcagtgccacactgcagtactgataactgtaggaccagtttcttcattgtgttctgctataggggtggcttggtcattcttatagatgccattaaaaactattttgggattgcactggacacatagttcaatgtgaaaagaattggcatctttacagtgttggattttctaatttgaaaacatggtatatctgtttatttagttcttctttagcaataaaaattttacataaaaacatctttaaggtttttgcatcttttttgttagatttgtatctgggtacttaaaatttttttttctatcacaagtggtattttaatttttttaattgaagtataatatgatgcatgcatttttttctgtatgtatgctgaattttcaagttaaactccggacctagatcaaaaaataacattagcagctccctagaaacaatcctcttgtttctttcctgttactaacatccccaagggctgccactgtcctgacttttaaaatcatgagtcagtttagcctattttggcaccttacataaatggaatcatacagtatgtgctcttctgtatctagcttctttcgttcagtgttatttttgtgatcatctagttgtagttccagattgttcattcttattgctgtatggtattcaattgcataaatataccaaaagtagtcacttttaacatttttaaaatacttttaattttttaaatagagacaggatcttgccgtgttgcccagactggtctcaaactgctgagctcagatgatccttccaccttggcctcccaaagtgctggaattacagatgtgaaccactgtgcccaacctagaagtggtcattttaagttgcattctctgttttcttgtagcttagaaatgctgtcgactttagtatatacttacaggcagtaactttgttaaattctcattaattctgatatctttttttgtcttggcttttctttatagatagtaattttgtttgctaatgatagttttttttccccattggtgtttatatctttcatttcttttgatcaagaagagaagcaagcatagaataatcagacgcaaagataatgggttatatattttataaataaatagaaatattttctttagattttggaagtgaaattgagctggaatttctacgtgttttttgtttctgttttgttttatgccctgggcttctgctgcctctcagtgcctgtgtggtttagacagggggagttaatttggggaggagtgggacaagaggggccagctactttgtctttggcctcctgttcatgtgtgtgcaattggagttgaatctttttctggaggtcttgataagctgtcacaattggttaatcttttcttggtttattagtgcagctagataacccagggtcagggaatggtaacttgtgttctagcatatatgcttgttatttaatggagtgtaaatggatttggggcatactgaactcaggagggcactcagaaatgtgttccactgtcctgagttttcatctataagaacttgagtgtgtatggatcaattaactggaactcctcagaaaacagggtgaagttttgaaagaaagttcaagttacataaagcattgaatcacaaattactttgtgatttctcagaggatgtcagcggtaaaggcggtaaggctcacatgtcagatctccatggggaatttttatacctacaaattaaagccaaattgattaccctgtatagataataacgtagagttggagatgccacataaagagaaaaatcttcagcaagtgtgtaattattagaaaaccatatacttctagctcatgattcttttctgctttgtgttgggtagatgcagaaaagttataagcatcaacttaatgtggttgaggctttctgaactgatctccatttaaccagttcactgcattaactggtgttctcaactccttctatgacataagtcaactgatgctcatgctgggtgggttcgttgaccatggacatcccagttgcatgccacgcacttccacgcctccccgttgagttgtaaattaccaaaaccagtagtatttggctttatagagtttagttattatgtaaattgatattatatgaacagaaaaaatgtgctttctgtggaagacagaatcagtgaaagtgaattctcaaaatgtgcttcccagatcagcagcatcagagtcctcttgaaacctgttaaaaatgcacattctcagcctccactctagacctgttatatcagaaacttggctgggtgcggtggttcacacctgtaatcccagcactttgggaggccgaggcaggtggatcacctgaggtcaggagttcgagaccaggctggccaacatggtgaaaccctgtctctactaaaaatacaaaaaaaaaaaaaaaaaaatctgtgttttaccaaactttccaggtgattctgaagcttactaacattggagaatcactttctaaaaaatactgccatcgaattaaacacaggagagagagggattataaaaatagaagaggtttctatactcagattgtttttcagtgaccagttctttattctccttaaagaaacagacattgaaaattcataatgcatcatggtgtagtttacatagaaaaacaaccagaactccattcagcagaccattctcaaggaaatgtactttgtgtcagtctaaagattgcagaatgaacgaacttttaaatactttaagttaatgtaaaaacgtttaaaggtataagtacccatttttatgattctctgctttaatctactcttttttttgttttttgtttttgtttttgtttttgttttttgagacagagtctcactctgtcggccagcctggagtgtagtggcacaatcttggctcactgcaacctccatctcccaggctcaagcagttctccttcctcagcctcccgagtagctgggattacaggcgtgttgacaccacgcccagctaatttttgtatttttagtagagatggggtttcaccatgttggccaggctggtctcgaactcctgacctcagggtatctacctgccttggcctcgtaaagtgctgagattacaggcgtgagccactgcgcccggcctaatctactctttaaactcattgtccagctagccaagcctgtttataagagaggaggactttgactatatttgataaatataatagccaaggctgataggcacccagatatgctggaagagctgtcagccagtgtctgttatgaaatgtatttctgttatgaaatgtatctcatttaatacttgctgcaactttatgaggtaggtacccattttgcagatgggagggagtgaaatttggaaattatacagctaattcaatgacaacaccagaatttaaacctaggcaggcttcagattgttctggtgtggcaaagtctaaatttcaatgaacagaaatatatatatatatatatatatatttgttgttgttgttcttgttgtgttttgtttcttcaagacaggtctcactgtgtcacccaggttggagtgcagtggcatgatcatggttcactgcaatctggacttcctgggctcaagtaatcctcctacctcagcctcccgagtagctgggactataggtgtatgccaccacgcctggctaatttttgtgtttttttatagagatgaggttttgccatgttgtccaggctggtcttgaactcttggcgctgaagcagtttccacctcagcctcccaaaatgcttggattagaggtgtgagccaccacacccagcagaaatatatatgttgatatagaatattttgcattgggtattcagagaacaagttaatttgacagctgtggtgaggccttctaacactcaccgtaaactttcctatgtcccaaagtatctctaataataacgttaataattaatagtatatacaacccatccttttctgaaggaaagttcagaactttctttagaacatctactgtgaattgggaaccaaaaaaaaaaaaagcaaatgtattggtattgctagggttaccatagcatagtaccacagactgggtgccttcaacatgggtacccatgttgaaggttgaatattttctcactaccctggaggctggaagtccgagatcaaggtgtgggcaggtttggtttcctctgagacttctctccttggcttgtagatgactgtcttctccctgcgtcttctcattgtcttccttctctgtgtgtctctgtccggatttccttgcttataaagacaccagtcataatgcattaggtcccattgtaatgacatcattttaactttaacctttttcaagctcctatctccagatgtcgcattctgaggtactgagggttaaggcttcaatatggaaatttagggtgtggggacatgattccattcataacaatagctaagatgcttttagatatttagagcttctcccaaaggttgagatctttgattttgatttgagatttgaaaaaccttgactttactctttgatataattagggcagagttcatagcaccaggctattttaaatccaggtgacagcagcttcttagtgggttttaggagggtaatatatttgggtagcagaatggattctacccttcaaataccagttaaagcttctttgatgatttagaattacatatgttgggccaggtgcaatggctcacgcctgtaatcccagcactttgggaggcccaggcaggcggatcacctgaggtcaggagttcgagaccagcctgatcaacatggagaaaccctgtctctactaaaaatacaaaattagccaggcatgatggtgcatgcctgtaatcccagctacttgggaggctgaggcaagagaatcacttgaacccaggaggcagaggttgtggtgagccgagattgcgccattgcactccagcctgggcaacagagccaaattctgtctcaaaaaaaaaaataaaaaataaaaaataaatttacatgtgttaagtcctaactaattaaaaagtttgtcataaaaaattctaactacaggaattcttgttatgggggaaaatgtgtaacacttgaaatgcaaataatcttcttttatatcaagctaattatgcagccattagttcaagccctgccttctgctgtcttttatatatagctctcctgtgaggtctcttcctgaaaactcttcactggtctggtaaggggaacagggaattctctcttaactctgctgctgcctcttgaaagaaggaaacaatgactggaaagataaaatatgctctatctgtggttgatttttgacccctaattaggtttcatctgtaggttcactaacagcgttttcctaccatatgtaaaattaaacagtaatgctttctccataacttaatttgcatgctcgaatcccttgtggatcagcagcattagcacaccctgggagctcattagaaatgcagaagctcaggacccaccacggatttacagaatcgaagaatctgcgcttaatagtgttcctgaagcatccgtatacatattgaagtttaagaagcattgtgctgatgtaccttcaaaacagtgttccaaaagaagaagaggaagaggaggaaaaaggaggaggaggaggaggaaaggaaagaaggaaggaaggaaggaaggaacttccatatagagtaaattcccgatgttgccatggcatttgtaaattgtcatggtgggtgagactatcttttttttttttttttttaatttatgagacggagtctcgctctgtctcccaggctggagtgtgtagtggcgcgatctcggctcactgcaagctccgcctcccaggttcacgccattctcctgcctcagcctcccgagtagctggcactataggcgcccgccaccacgcccagctaattttttgtatttttagtagagacggggtttcaccgtggtctcaatctcctgacctagtcatccacccgcctccgcctcccaaagtgctgggattagaagcgtgagccactacgcccggccaggtgagactatcttttaacctgctaatgaattataattagcatataatgagcagtgaagatgaccaggggtcactttccttgccatcttggttttggtaggttttagccgcttctttacctcatgctgttttatcaacaaggtatgtgtgatctgtaccttgtgcagaccgcctacctcatcctgtgacttagaatgcctaacctcctgggaatacagaccagtaggtctcagccttattttacccagcccttgctacattcaagaaggaatcactctggttctaatgcctccgacagaatggtcagattctcagactctaaagcaaagaagactatgttcagtgacagcaagactgttgaagaaaaataaactcgaatggccttgaggagctattatcaataaaaacagtataacttataattatctgttgtgttacaatgaagtatatcatcactgctgtactgaatattggatttcagatgtagcactgaaacatctgttactgaaatatgcaccagaatgtcttatgtattccttgcaggcattgttgtttatagaggtcttctgttgttttagtgttgttaatatgtagcagatgcacaaggaaagggggaggaaagaggaaagggcggaaagcgccctaaagtgccttagagtttttctgagatttaaatttgtttctgtttatacttttactcaattggagaaaataatggaggtcttgaaggaatttgtgccaatttgcttacataactattgcatatgtatcagagttcagtgactcatctctttaccatcatggggtttttgacatgcaaggctagaaaatttcatgagattggttggctaaattgaactggttttgtagaatgaatacataaaaattagtgcattccttatataacaacacaactttttcgttgctgggtaaaaaaaaaaaaaaaaaattcactctaaggcagtgaaattttaaagactttcagttccaagttgatgatttaaggaaatcctccatgtacaggaagaaaatggaggaaagagatttgtaagtaccatgttgaatccattatagttcagaaaacgaaatactagattctgacatttcagtgagatttagttgtcaaatttctggaaggatatttaaaagttcatgcttctttattctttataagaagtttgttttagatcaagtcataagcatatgtttccagggtgccgcaatataataagcccaattcttcgttaggtgagaaattagactgggcaactggagagggtagatggtgtccccgtctttcaggaccgttctatcttcatgaagcccttcatgatttcttctgccaggagcaatgtctccaccctccaacctccaggaatgtttcatacctttcttattacattggtcgtgttttgtgtatgcttgtttcattaccattcttttttccttccttcatttggtaggtctttgttgtctttgttgagcacttatgtgtcagacactatgctttctaattgggttgtaataaatcatgcattaaatgtagcaattgccacatttaatagcagtctaaaggcctggcgtggtggctcatgcctgtaatcccagcactttgggaggcctaggtgagaagatcacttgaggccaggagttcaagaccagccttggcaacatagtgagtccccatctctacaaaaaaattttaaaattatgtaattagggcggggcacggtggcttatgcctgtaatcccagcactttgagaggccgaggcaggtggattacctgaggtcaggagtttgagactaacctggccaaatggtgaaacttcatctctactaaaaatacaaaactcaaccgggcgtggtgttgcacgcctgtggccccagctacttgagaggctgaggcaggagaattgcttgagcctgggaggtggaggttgcagtggccgaaattgtgccactgtactccagcctggtcgacagagcgagactccgtctcaaaaaaacaaaaaaaaaaaaaacaaaaaaggaaagaaattagctgggcatggtggcttgcacctgtggtcccagtctaggttcttgtacattcttatattggacaataatagttggatgaatagtgatgcttgagatgcagattcccatctataaaactataatttcacttagcaaagacctcaaataaatcacttcaatgctgtattttaaaagtacctttgcttcccattactacatgaagagacttctgtaactttttccagacgacacaattagatttactgtgtcttcaggactgtggaggaagttattgcaagttttactcagacagttacaaaaataaacatatgtaaggtcgaaggactaaaacaattggagatcactgccgagatcaatgcaacctcaggagtttaatctatattgagggtgtgctttctcttgaatttaggaccaactagcaataacaaatattgaagttaccagagacttccaatggtctgttggttgctgttctccacttgaaagggttggttggttactcccgactccagacttcctttccatttatgtatgtatgtgtatatatgtatagacagggtctcactatgtcgcccaggctagagtgcagtgactgcggttgagctcactgcagcctcaacttccccaggctcaggtgatccttccacatcagtctgcaagtagctgagactacaggcacacaccaccacaccaagcaaatttttgtattttttgtggagacaggattttgccaacttgcccaggctagtctggaccttctgggctcaagggatctgcccaccttggcctcccaaagtgctgggattataggtgtgagccaccatgcccaatctccttttcctttgccctaacaaacattctggttgttgctactcatttttttttcaaaggaatgcaaacacacttaaatgtaacacataaatctgctttatagaaatttcatcattcattacatttttttgaatgtttgtattattcgttaatattacttgtgaatacagttagttgcattactgacttttatgatgtttgttaacttgtctgaacctcatctatgacctagggcaataatagccacattataggattactgtgattaaatgaaacaatatgtgtaaaatgcttggcaccagcctggcacataatacctgcaaactctctctgcctccattttcttcttaaacatttgcttgggactgtgaaacatacagtggggcacttgcacatgtgtgtgtgtgagagagatagagggggagtgagagagacagaaagagagatcttattaaaattagtggcaatgggccaggtgcaatggctcatccctgtaatcccagcactttgggaggccaaggtgggcagatcaccagcctggccaccatggtgaaaccccatctctactaaaaatacaaaaaaaattagccaggtgtggtggcacatatgtgcaatcccagctactcgggaggctgaggtgggatcacttgaatccgggaggcggaggttgcagtgagccaagatcccaccattgcactcccagtttgggtggaagagtaagacaccgtctcaaaaaataaaaataaagttaggggcaatgaagagaggctcagccctctccctggatgaattgttctgataatgtcaaattaacctggactttgacataagtaatatgaagttacttttaatcattcatatgtgtttgagttggtcagtgtgggcttttttctcattagcagaaatgtctgtcttttcgttaagaaaaaaaacctctgtgcacagtcagcataagatgaaaggagctatagtttaaagagaggaaatatggctttaagatctcttcaaagccaatcaaaccatcagattttatcttaactcaagaatctggttggaaatgaataattttatctttttaagagcttcatttgtactaatcaatgtagtgtacatcaacttttgaattttgaaagtaactagctttttgttatatacttgtaaaaattgaagtggataaacatttttgttcacaagggtacagttttatgagactgtcaagggtagttcctccttttcagttacggagagagagctacattttatgagagaatttaaattccccctcctttttatgggaaattggtgcttagaggttcgtggatctgttggggcagtggttttcaacactggctacatgttagagtcacttggttgcttgtagaaaaatagtttgcacagccccagccccagaactgagcttctgatcacttggcacagacaagagagcgcaggatgtgtcgtttttctctgaactgagccactccaacaggtgggggccaggtagggaccatagtgaggacccagctgcctgctgagctgagccaggtctctgtggtgctgaattttcctctctgatcccatgggggctcagcagaaatagctcagggcttgagccttaaactgcctatccttagtaggaattattctttgccaaggacagtgtttcttccaagtctgattgtgacatttattcaggacagctatagaaaacacagataagaaaaaaatatttccaatcccactcatgagagagagaaccattttggccttttagtattcctccccctccccaggtaaatggtgaaaataacacaactagccaaaaataagcttttgttattaaatatttattttgggccaacaagtgaagttgctgttgcccttagcgtggtgggaagcctggagcacaggtgtaaaggaacttgcttcaggtattgcagtaataaatcaatacaggatctgcctcactgcaaggtaaagggacccttgtgaaactgatatgtttggttattactagtgaaaattgagtcacattttacattagatggtggccatatttatgacaaacagcacaagagtattatttttaagtgtctttttttttttttggagacagggtattgcttggttgcccaggctggagtcagtggtgcagtcatggctcaccacagcctctacctcctgggctcaagcgatcctcccacctcggcctcccaagtaggtgagaccacagggatgtgccaccatgccctgctaatttttaatatttttgtagagacagggtttccctatgttgcccaggctggtctcgaatttctgggctcaagtgatcctctctgcctctgtctcccagagttttgggattacaggcatgacccacggtgcctggccttcggcgtctttttattatgatattattggggattctgtatttatgattttagaatactacctgctggaatatttcatttggctttttagctttgggagcatgtagcatagggagagttgaaagttcctaattaggaatgggatggtgttcagccgctctcgtctgcacttaagcaactggtgtaggtttcttttcttgcctacctgcaagtgcacgctagaagccgggccctctgctctgacctcacacaggtcacttaagaatttgaagaaggccaatgtcctgtggccattagacagtagtgtgagagatggaaagaggtgccttttgtaattacgaagaaactgtgtcctggattttatgaaaatgcttgtctttttattcttttcaacttaaatgtttactttttcgcattcttcaaaaaaaaataaaagttgaccctaacgacacaatttagattgaattgagttataaaaggcagctttctttatctgtgagagaaaatataacttgaaatcctatgtttccatagttacattgcattgtaataagataaaagcaggactaagggatatgtttgaaaggcgctccaggagctggctgagataaatgtgattattaagccactgtgccaggctttggtggggagctaggcaggcaggtcgaactagttgaaatttcccattagaagaaaggcatttctaatgctttgtgttgaaggtaaaagtgaaccacagaaacacactattgcttctgcattggaagtttatatttcactcatacttagaatcagaacttgttaaagtagttgcttttggaactgtacataatatttttcccgtgtcaggaaatcaataaacttaaaaaaaaatctaaattgttggtttgatcattctgatttctactccttcttatgtcccatttagttaattattttctttattcaaagaatactggaaggccaaaacattgtggcccacacctataatcccagcactttgggaggccaaggcagaaggatcacttgagtccaggagtttgagaccagcctgggcaacatagtgagaccttgtctctacaaaaaaaaaaaaaaaaaaaatgagctgggtgtggtggtgcgtgccagctacttgggaggctgaggcaggagtatcacttgagctcaggaggttgaggctacagggagctcaggaggtttctaacaaagaaagatgcagttggtatgcactctttcttggttaagaggagagattgccaaccagtacatcttttataggtgctgtaaaatcatgttatacctgcactttcttgggtttcctttgttcccatcacttgacaactcttaaattcatgttctccagccattcttttcattattaatagaagagaaactgggcccaggaaggttcaaggatatggccgaggtcacagagcctttctcttcttttaaagaaacaatgatacactttagatattcttatcttactgtgaattaatttttttttctaattaagctttttgggtgaccttgagcaaatgaaaagcttgactttttcctctgctttaccgtattgtgatttccttggggttggcagagatttggaaagggatgtattccagaactggaaaaataatttggccaaattaagcaaaatctccatgggatgttggtgccacttaccccagtttttttttttttctttccattctcacagacttcctcctcgcttcaaccctctctctgctatctgagtcaaggcctctggcctgcatacaagctgtaggagcttgcatagcgtttctggaatctgtacagtagtgctgtgctgtggtggggtggggagaaggcaaatacaagggtgttgaggtgacagttccggtgtgtcagattggtgggtcagagaactgtttgctcagtgccagaatgttggaaaacaaaagcaagtttctaagtaaccccaaaatagattcacaggcaggatcaagaagctaatgcagatgttccttattttttagaaagaagatctaaaaaccttatgcaactatgcagaatttctaaaatggatttcataaggtcgcaacgttactaaatgacttgtttattcagccagcaatgctttagtctggctgactcttggtgtttaattgcattagttctatgaagcattttgtgatgttgttcaccgatgtacaaggcattcgggcatacaatacagtatttatgcaatatttaggtgattttcaaaatataagcctggtgccaaatatggatgtaaaattttaaacagtatgtctaccataaccccatttgggaggggaaaagttatgtgtgtgtatctgtgtgtgtgtctagcatgtgtcggtggttctcaaactttgacatacatcggagtcacctggagggcttattaaaacacagattgctgtgtcttcccctagagtttcttattcagtaggtctgcagtggggctcaagcatttgcttttccagtgagtttccaggtgatgctgatgctgttagtctggggaccacagtttgggaaccattgtggggaacagaagcatagaaacaaatctagaaggaaaatttaccattattgtttaacaatagttatcttatgtctggataatgggattactggggctctttatttttcttttatactttctgcatttttttcccattatcattagaagaaatcgcatttaaaagtttttctgaggctctaatacctacgctgtcatgaacacacagttgttactgtcttctattgtccagtcttacaatgttgtcatttatgaccacagagcttcatggaaccaggtgaggtggtgcatgcctgaagtcccacttaccagggaggctgaagtaggaagatcacttgagtccaggagtttgagaccagcctaggcaacatagcaggatcctatttctaagaaaaagtttaaaaataaataagaacaaagcatcaagaatgcaatattttgtgtccctggtttttattttgccttcccaacatgtgagttttagggtacctttatcacttcttattttactacatggtgctaaacacatggtaagtgttcaataggtactcaatagccccattagttagaattgattcttttatgccacatcacttctcttaagactccatggaatactatttcatgagtgcaaattgtgtttgatatccatttgaaagaggaagatctcatcaaaatctgaaagaacagtaaagaatttgtataaggtagcaaaataagacaaagctaaagtgataatccagctctcgtgaccttagaataaactggtcaaccaagaacaaaactctagcactagaaatagcactttattatgtgaaagctctcacagtttggcctttaacattttaggaataataagtgtgtaacatcacacataaaaaacaaagccttaagaatgtggtgttttcccatgaaagaacagcaaggatattatgcatatatgtgtgtttcattgatattttaggaaggccctttgttaatcaaaaatgaacctgccggatgttgattagtggagaaaacacttagaatacagagaacaatttttaagcctgagtctaccaaattctaggcaagttccttaaccccttgtgtaaaccgtattctgtaaatgggaacattggtctgtaaacagtttggattttcacaatgatcaagtgaactcatgcttgagaaagcctgttagaagcgtgttaaaatcctctgaactccagggtagtggtagtgagatcaccactgtcccttttcttttcccagccctgtggtctattgtggaaacttacttaactccctggattttctgtcccagggaaggttatggcaaagtgtggcaaatccaggttcttctagtctaccttccatcctgcccagctaatttggcagtaccactcagcctttgtatgaactctgaggtcaggcaactttagcaaatgcaagatagcttctgaatgctgtttttcctgataacgtaagttcctttcctattaccctgtttccaggaaattaaaataattactgtctctgtggaaatgcatgaatccgttattttaaaaaatgatttatcacctgaggaatttgttacttcttgttcagtgcctgtattaggaagctaaggaattaggcatttgtgagctctcccttatacattctcatggtgcttcacaatgcccgctaagctggtacttctttcatctccttcctaagtaaatactcccaaatggtttaatgtatattgatgaaagtttcaaaataaattgtgcttcttttttttccaggaaaggggtaatgttgttctcctttctagtttccgtagcacttggccaagttttgtcacctgttaagtccttttatccttcagagagcaaaaggataatacacttcacaaatgatatctttttaagcattgcaggcagactgtagccccatttttagtcctgtttgtttgacttaaggttcagtgagtcttgtgtaacagttgcccttcttgtcagctgtctttcaactgtgccgttgactgttgtctggttgtgggattagtgccatcatgaagactggctaatgtgtttgcatgtagtgcctcattcctgctacaggaggaggtcagaaaggtaaaaccaggccaggtgtggtggctcacgcctataaccccaacactttgggaggctgaggcaggagaatcacttgaggtcgggtttgagatcagcctgggcaacatagtgagaccctgtcttccctcccaccaaaaatagttgagagtgcggccgggcgcggtggctcacgcctgtaatcccagcactttgggaggccaaggcgggcagatcatgaggtcaggaggtcgagaccatgctggctaacacggtgaaaccccgtctctactaaaaatacaaaaaattagccgggcatggtggcgggcgcctgtagtcccagctacttgggaggctgaggcaggagaatgccgtgaacccgggaggcagagcttgcagtgagccaagatcgtgccactgcactccagcctggccaacagagcgagactctgtctcaaaaaaaaaaaaaaaatagtcgagagtgctgcacacacctctagtcctagctgtttgggagactgaagctagagcattgtttgagcccagaaattcaaagctgcaatgagctatgatggcgccactgcattctagccttgccttggtgacagagtgagaccctgccctccccatgcgccccccaccttgtctctctctctctgtctctctcacacacacacataggtaaagccaggtgataagaatttcgtttttagcctaaaatatgctttacaaagcaggtagtgatttaacaaattgtgagaatcctgtacctttttctcaaagagctcctttgttttttttttttttttttttttttgagaaattcttttcttttgagttattgctgtggcatgagctcattctggaatgctcacatgatcaaattgtttgtaatcttgtgtttagcttttaggttatttatagtgtctatgatcttacattaaattctttccattatataatggaaatatacatttccattatgtaccagtctttctttctaagttcaggtttaaatgattcatgtgaccaaaggtattctgaagttgaagtttaggactttatgtgacctctattatgtgttttctgtgaacatctttttaaccatcataattttttgcatggttatattctgatgacatttaacacatgtgaccttacttgaagcagggaaatacagtttcttactttgtggtgttctaatggtaaactatcttggacagcatgatacagagcagcaaagagaaggtatttatagtgaggcatttgactgctttgtagtctccttgtagcataatagatacagcagaataaagtgaactccggatttccttttccctcaatccctttgcagcactttggtccatgaagtagaacccattgtggctcctctgccctttggtggtggcctctgatgtggctagcacctggtattcccaggttctgtagctgtctggatccactgacaccaccaccttagggctctgagagtgtctagattctctcatgttactgattccaactggtgtggaaaggtttccttgaacttcatctgagacaggtttggagtactttgaacattttagaaaataaaccccaaaaatatgttcacacaaaacacctacgctatagagaagcatgcacatgaggggtagtcattttggttcatgaaactgtactgtgcaaagtctgatgaagatgggatgagttggcccaggtgactagcttcacagacttcagtttatttttccatacttaaaccagcctgggaagtagatacctaaatttctgcaggaggtcttcagctttcatatattgcattttctcgcagcctgtgtgattttgcacagtatacaggacagaaagattctagactgcctttctcttgctgaagcctgtctttcacatatcagctggctgatgactgtgagtggtcagggtgttgttgctgtctgctggtgccagcctctggagtgtagggggtgctgctctggtgctgcacgggctcacgccaagaggcctgccaggtggaagttgcttgtttattccaagagtcttcttgcctggaccagcctcccatatcctcaccatcccgttgcctctgagagaaatctcactctttttctctgtctcagtacctagcaattatggaggtgggaaattaattgtactctgattcatatttttattgtggcaaaatatacttaaaattgatcattttagccgtttaaaagtgtacaattcagtggtatcaaatacattcacagtgttatgcagccatcaccactattcattttcagaacttcttcatcatcccaaacagaaagtctatacccattaaataactccttattttctgtcccccacccccaaccaagcccctgggaactgctcttctactttctgtctctatgaatttaactactctgggtacctcatgtaagtagaatcatacagtgtttatccttttgtgtctgtcttatttcacttagcataatgttcatccatgttgtagcatgtatcagacttcccttcctatttatggctgaataatattccattgtagtatataccccattttgtttattaatttgtccactgatggacacttgggttgtttctaccttttgactgttgtcagtaatcctgctatgaatactggtatgcaaatatctgttcaagttcctgcattcactttttatctgtttaagttcctgcattcactttttttttttttgagacagagtcttgctctgttgcccagtctggagggcatggtgtgatctcagctcactgcaacccctgtctcctgggttcaagcaattcttgcatctcagccccctgagtagcggggactgcagtcacatgcaccaccacacctggctaatttttgtatttttagtagagatgaggtttcaccatgttggcgcagctggtctcgaactcctgatctgaagtgatctgcctgcctcgacctcccaaagtgccgagattacaggtatgagccaccgcgcccagtccctgctttctcttcttttgggtatattcccagaagtggaattgttggattctgattacattttaaggaactactttcagatagtagctacaagttgtttatcatctgaatatatcctaatatacttaaacattctccacttattacactctgagattataagtaatttttacgtcaaagaaaatttcagtctccttcttattagtccgatgcttttccagtgagtatataattggggatgccttctagccgagaagcagctggtgaaactttgttctaaatatcagaaaaacctcctacatgtgttttaaagaaacgtaccaggggccaggcatggtggctcacacctgtaataccagcactttgggaggccgaggcaggcagatcacttgaggctggagttcaagaccagcctggccaacatggcgaaacaccatctctactaaaaatacaaaaattagccgggtgtggtggtgcgtgcctgttatcccagctactcgggagactgaggcacgagaatcacttgaacccaggagacagaaggttgcagtgagccaagattgtgccactgcattccagtctgggtgacagagtgagactctacctcaaaaaaataaagaaatgcaccaggagacagataaatttaggaattcgtggaagtttacaagaactgaatgttggtcactctatatattaatacaagataagcaatgcatttcttttcagaattagtaggaccgtggacatgatgactactttaattatatgtctggttctgacatcttcattataagatgagcattttacataagagcatcatagatacagctgcctcttctggtgctgtgggcacagcagattctctttaagagttgggttaggggcaggttagtagtaactgacatatttagtaattgtagctatttatactgctaactaaattttccttctgatttgctgctctcctagccaagtatcctcttcattaataactaatttccagagctaactgacattttagtgtccttactcctgaaaaacccttccaacagataacactgtttgccttcgtcattactctggtagccccccaattctcacagaataactgctgctaattagacatgttctttattaagtgttgaggtgataaactttgtttaaatgcagtgcacatacactgaagcacatactgttgattatcagctcctgcccacggactgttgtttgtgttctctcccagtaaagtgtccaggaaatcttttgctttctcttgtgagttgtctgctagatttgtgccttcaaagtgatgatggagaaaccatgtgtgtttactccacacaagacagtgaataatctcacacaggtccctagcttgaagtgtcatctttattttgacctcatattgcctttctcatttagatgtctaataagcatctcaaagttagcatgtttgaaaccaaattcctcatttcctccaccaaatcagctcttcccacagcctctcatttcagtcaaaggcaaccctattcttcctcccgctcaagcgaaaaactttgttctcaatgattcctctctcacctgcacacctcagatcaactcatcagcaaatctctttgctctaacttcagaatacatcccaaagaagactatttcctaacgtcttcgtctccaggcatgcgcttgcctcagtgtttctgcacttgtctgtccctccgcttggatattattctcccagataatctgatggatacactggaagcatttgttgatatatttttttctcttttgggggagcgtgtttagaggaagaagggaatttaatttgattcagacatgaagcttgtgtataaagatactaaattttcttaggactatatccatctgtctcctgtctttttagatattgcccatcatatggtgtggggaaatcagttaacctaagcgttgtagcaatttgttgctgtcacttctgaatcagctaagttttcatttcatacccagctatgatcactaataaaagaaaatattgtgcatggaatgtaaaaataattatctcagtatgtttccatctacatctggaagactttgcttcttagcagccttcttttaactttcgtttttctctgtcttgccccttctcatccacttctcggcttatcatgccgtccttcctataactctttgtccttgttctgttgcatttgtaaggaagaattgggcaaaaaaagaatatttagtgcaacataaatgtaagctttaagaggtgcttcccccagtagaagttttgttttttgcttatagacatttcatttttcctgcgagtcctattagttgagtgactaaaaaatctgcagtttacttatagaagcacttttattgattaattcaaagagaagcttttacatcagaaaaaaagggacatcaaacacactaatacattgaacttttaagtaacaacattgagagtatcattgggcccatagcaatttaacttatttcaagtccacgactagagattgttcagaaaaatccctaaaatgtctattgtcaccagctctaactagtattgtaattagtgtcaggaaaatattgcagatcaagtatgggtcctgctggaatctgtgtaagtggcttttttgagcacgtgaacaaatggtttctgaaatacatgcttagaaatatcatctctgctcagatatctcacagttttaacatatatttattcagtgatcctgataatttttttaaagttttaaaaataattttaaaattctagagtcttgtacatatgtatttttaacctgtgaacatgttatatgagagtcatatcttaaagtaaaagattttttagctcttccatgtgtcggatattgaagtgggtgctgaagatacaacaggattgaggactgggcctgacctgagagggctgatcatgtaaatactggttattattctcctgggctgctaagctagttgaatcttagggaaaggtttttaagagttgtgccctcactgacatctgagataagaaatgaagatgtctagtatattcttagctcagacactggtgaaaaggtgattgaagacttagaggaaattgagaaagggctaaaaagcttttatgtgattcttggcatgcagctcgtgaaagattttggtctgctccctttttactggcccttctcatttatcttaagtgtcatttgaaaatgtatgtttcttaatgcagtaattgtgaagagggtcaccccaataaccatatattatctttccgcaaacatgaagaaaactaagctaccaaccaccaaaaaaaaaaaaccaaacccagggattcatgcctggcagcctccaggtctttggaacagggaagatgtaatggaatttcctgttttaattgtgaagacttactgaattccgggggcattcttgaccttcccgtagttgattaatctctcctaattgaagtctcctgactcatctactttatttttaaatttttatatttggagagaatcactgcttactttttatttttattttattgttatttatttatttatttatttatttatttagggacagtgtttcaatcccatcgcctaggctggggtacagtggcacaatcttggctcactgcagtctccacttctgtggctcaagcgattctcctgcctcagcctcctgagtaactgggaatacaggcacctgcgaccatgcctggctaatttttgtaatttttttgtagagacagggtttcgccatgttgcccaggctggtcttgaacttctgagctcaagtgatccacctgcctcagcctcccaaagtgctgtgattagaggcgtgaaccaccatgcctggccttgcttacttcttaaaattgtggaatatatatgaaggtgataaaacatacgtaaaacatatgtgcaggctgggtgtggtggctcacacctgtaatcccagcactttgggaggctgaggcaagaggatcgcttgagcccaggagtttgagaccagcctaggcaatgtagtgagaccccatctctatttttttttaattaaaaaaagaagaaatatgtacaattaaagaataataatagaaatgaatatccacataccctctatctagctgaaaacacagataacccatgttttagaagagtggacccaaaggagtgtccttctaaataacctcactttcctgatttttatggttatcatttctttcttttttttttttttttaagtttttcatttaactatttatccccaagcaatatatttttagttttgccctttttggtgaattaatgtaatagaatcatgttgaatatattattcacgggcttgctttcttctttcaacattatttttttcagattcatccacattgatgtgtgaaactgtggttaatgtccttccactgctgtaaactgttgcattgtatggagtaccatggtttatttttccatcctccaggtttgtttcttcactggtgtttggaaaacaacatggactccaaactcctcaagtcaccttgccacagatcccttgagttgggggttgggaatttccaaattgttggctttccttagtggaaatactagatgttctcatttctggagaccttctagagaatggactgtgatggacttttgcaggggctgttagctgttgacctgagtctcctgggtctggagttaaagccctgtgtctgcaggatcttgtcgatgagccctcccctggggtcactccttctagtgacttgaaataagttaaattggacttgaagtgagttaaattgttgtgggcccaaaaatgcttccagtgttgttaattaaaagttcaatgtattgtgtttgatgcccctttttacctgatttaaaagcttaagtttctctttggattaatcaataaaagtacttctataagtaaactctgcagattttttagtcactcaactaataggacttgcaggaaaagtgaaatgtctataagcaaaaaacaaaacttctactgggggaagctttggagctttaggtagattggggccagccaagagcccaagtggtttaaccagaagcaggctagtcttcagagcacaggacgacaccaagagtttttgttcttcccactcttggctttccaagggcattctcctcccttcctctctccccaccttgattctcatcagttattggcagatgttctgttctattgtgtcctcactgagggagtcagtgaaggggcacacccattgtctcattttaaaataccccaatggaaatgatcaaagtgcgaataaaaagctcagctgtttgcatttattttcaaatgtagaaaaactttctggaaagattgtactaaggggttactggcatcattgttatggtcctctgacatttttaaaagtaggtctctgagtatgtttttcctccttcataaagtgaagactgtgagtgtatttttctgtattagctggttattgttacttgagatttgtcagctttccttgaagtgtgttcccttgaactggatgctaatgtttgccatgcagggaagaatgtctctgcagtaaaataaagttaaatcagtttatttactgcacaacttctcagtgcacttgatatgctaccatgctttgggaatttttaagttgggggcttatagaggcaggcattaaaaaacatgtttgattatgggaccccctactctgaactacactaacattagtgtgtcttgctgcagtaatccttctctgaatatctttgggaaaggtgtcatttatgtatttttcattgtttccattggttccatttgcctagtaggcctcaggattgcagtggaatttttccagtaccttaagatagcatttatcttggaggatatgaccctttaagggcaaacttatttgcagttcactttcaatttacaatgtttattctaagcaatgcatattactttttttttttttttttgagacaaagtcctgccctatcacccaggctggagtgcagtggtgcaatctcggctcactgaagcctcttcctccctggttccagagattctcctgcctcagcctcctgggtagctgggattacaggtgcacgcccccaggcccagctaatttttgtatttttagtagagacagggtttcaccatgatggccaggctggtctcgaactccggacctcaggtaatccacccacctcggcctcccaaagtgctgggattacaggcgtgagccaccgcacccagccgcatattacttttacatgaaagtagagtgaataggtagttttgtaaattgatgaaaagaataaggtctcagctttgaaaggatattcattgtccttggaatggtattccagaaaagtaggaagctaaccaaaaggcccagaccaaaattttctttttaatgtctcaagcagagaaagattttgtgtatagaaacactaatgaaaatgattgttctccttgatgattgtaaaagaaaaaagtgttcttcctatcctctctccttcccacctttcatttttggtaagtgggggagaagtgaaggtgaagatgctaggaatgctaatttaccttgtattttttttttagacatgtttcatgacaggtttgaggcctgctgatttgggcatacccagttgcaccttttcatttcgtgcctcattggagtatgttttcttctgttggtcactcctgttttcttgacctggaccatgtaatagagactgggacgaaaactacatgtaattacacccttttggtcaaaacactaaaacagaaaccaagcaagcttaatcctaaatcattgaaattgtctagaatctttatctaaaataaatcctaatccaacaaaaaattttcttctaactcaacctgctgcttatgtcttcccttccatgagtattttaatagaagttaatttttcagatcactggagcttattccttcaaacactggtcctgcactgttttgctgtatttcttcactgtcgtagcagagccagaggctgctggatgtcatcatgagcatccattattttccacatggtgaaaggggcttgggttgccctcagctttcacctcttgtcacagtattgggctgccaggagacaccgttcggctgccaccctgtctcacagccctgcttgttagctgtcgtatctgctgtgtgtgctggaaaactagataatagaacaggtcaaatcagggtaggtaaagcagccactgagtgcattaggagtggagacatggctgaccccttggggctgtagaacatctatttttgatactcacagctttcttactctggatatataggagggttgaagtctctgagaaaaggagtgattactattctcagcaccatgtgaaacttagatgagccctttggaaatttataatctgctagtttgtttccctaagttgaatatgaatccatgttggatcagacattaatataacttttgaaattctctcaacggtcttattttagcagcattaagtacgtagtactttacctgtgcaagactggccatgtattggtaattgttgaagagggatactttctactgttttgtgatgtgctgtgatgttttgtgatgttatgtgatgctgttcacattccatttgtatgtgtttgcaattttcactattaaagcatttgtaaaaacacagcactatatgtatgtttacttggtcttcaatccaaagagtggagttattcagggaaacatcaccattttctcaaatgttacaagtgatccgttgatgtgagccaaggactgcatctgtccattcatttaagagatacttactgagtgactatttcgtgcctgacaaccctgtaggcactgggaatgtatcagagaacaagatagacaaagcctctctttccgtggatcttataactgtcagatccaggggagacctgtggataataagcaaataaataatgaaatggtttaacatggcgaaaggtgctgagaaggaaacaaagcacagtgataggagactgagtgacagggccaagcaggatgcaggtgggatggaggtggtgcaggcagcctcaacattaatgtagggagtacggggaacactcctctgaggagcaagccctggagagggctttccaggcagagggagcttcttgtgcagatgcctggggatgggagtgctttcaattccaagtgatacttctcttacctgtaggaaggcagccccaagaaaacacaaggtccatttagataactcgacacacatacctgctgagacccagaagtgggaattagcttccccacttgatacctgccactttaagagctactgagtaatccagtaaataaaccagcaacacattcctgtgaaaaggactccaaattagtagttaacagacataaaataatcatttttctgtagtagtaaaataaatgtaactgttatttatgtaaaaataggctgccgtttaagtacaacttgtcataaatggcagtgtgggacatttacattcttttggtctacagttctgagactattttttatgcatgtatgtatttattcagtaaacatttatcctctgctgcacgtcaagcactatgccagacccgataggagagaacccagggtgagtgtgacccggcctctgcttggaacgagatgggtgtctctagccaggccaggtgcttaccatgtgcctggtgtggggtccatgacaccaagcagggcagacctaggcatcctgttggtgcagctctgtaaaggggacaagacagacaacaaaccatgactccgagaaagtgcaacaggtgccacgaggaaacagaattccaggacaggaaggtcagggaatgcctctctggaccaagggggagaaagaaccagcaggggagggtattcctggcagagggggcagtagcttgaagcctccaaagtggaagtgttatgaattcttggagggtggaaaggaaatgggagctgggaaaggtgggcagcatttaccatatcctacagacgacaatctggaacttggtatttgtttatcccaagtgcattaaggcattgttgcaggattttaagccaggtaaatgataggaaatttatttgaaaaagataattctggttgcaaagttagctacgttgttaaggggatatattaaaggccctgaactaggttttaatcctagttttgccttttacttagtcttgtgagcagtttactcatctgagaaatggagctaatgagtccacctcaatagtggtaaggattgatgaataagataaggtgtcaagaaccatgtgtaagaccaggtgcagtggctcacacctgtgatcccaacacttggggaggctgagtcaggtggataacttgaggccaggggtttgaaaccagcctgggcaacatagcgaaaccccgtctctactaaaaatacaaaagttagctgggcgtggtggcgggcacctgtaatcccagcttctcgggaggttgaggcacaagaatcgcttgaacccaggaggcagaggttgcagtgagctgaggtcgtgccactgtactccagcctgggcaacagagcgagactctgtctcaaaaaaaaaaaaaaaaaaaaagaatcgtgtaaaatgtagaatatgctcaataatgttagttccccctccgttttcctccttcccgtagagtagaatatgtgagtaaagtgttctggcatcatggaaatgcagcacagtctctagtgatcttggggacagcaacaccaagcccagtggcagctccatgaaggttatgggcacagtgtctagtggagaattttttttttttttttgtaaagttgacctggtccattcaagtattgcaatagtaatggtggctttatttatagcttgttgtattgagattatgagtttcgaatatttaacagattcttcccttcttcatgccttttggaagagagaactaagttgctaatgcagtactacactactgttacttcaccaataatactcagggttatattaataggagaatctgcaaagtttaatgccacttgttcatacctggggctctcctctaaactaaataaatttcttaacctgtccattcatttgtattttcctgttgttgtgaatctctaaatatcttgcacaaataatgagtttcctatacaatttgaggagactgtgttattctgaagaattccatcatcataatggtgttcattgggtctatgttgtgagtttgtctaatggaaaaaagatttgtttctttttaactgcataaatagtagattcaaataaaatgctgttaagtggaatgcaggtaataaaaaccgattcagacatggcagctagcctgatggggtttgtagcataacaggaagagaaacttgcaaccttattttagccatccttagattggtctcaggtttgcctcatagtgaattctgctctgggaaggtaacaggcgttataggaaagtcatatacacagtgaggtttcacatgagggcaagctccttattacctacccatttatttattctgtaatgtggttggatgtaatttaaaatgggtccttggatccccccttgactgcttttaggtttatgtaggtctagaatcaaaatccttgtattcctagtttgctgtccacaatgaagatttttaatgtcatatttcctaacctagagaataatactgccatgaacgcttgccactagtgtgacttttgtcacagacatgtcattggcagagactcatttgtagctcccaggtctgtattgggaatcaggatgagaaacgccatcctgcccagttagcatgcctcctaaaatctcatttgtaatagacatgggattcatttgaactgtaatttattttattttattttatttttatttttatttttttttttgagactggctctctgtcacccaggcttgagtgcagtggtgccatcttggcttactgcaatgatcctaccacctcagcctcttgggtagctgggactataggctcttgctaccacacccagctaatttttgtctttttagtagagacggtgttttgtcatgttgcccaggctggtctcaagctcctggactcaagtgatccacctgccttagcctcccaaagtgctgcgattacaggcgtgagccactgtgcctggcctgaactgtaattttcctgtcctggtgattcaactcaatgtgacattgaaactacatggttctgcagtgatgtcctacagaatcagtaggctgctgagtcagggggtctcttgctcccagagtcctcaaggtggcaggtcctgcacgctgtcaaactgcaagcatctggcatcagcaatgacagctgcttctatggaagatggagaaaagaagtttgtaggtaaaataaatggctgaaaatgaggggccttgcatcgcgtgtgttactctgctgcttttaaaagctttataatatgttaattcacttaaccccacaccagctctatttgacaggtgaggtaactgaggcactgagagcttaagcaccaggtccaaggtccctacaaagtggtggaggcaagaatggaacctgggcagtctggcttctgcatccctgctcctggactgactctcataaaaggccgtttgtgtgtctcaactgtaacctaagggattattcagctaataaccctgaagctattacatggagcatgaagtttggttctgactccctaatgtagaaaagtcaaatatattatctcttatgctaccatagataaatgctctcaaggtacaagctctcacataaatggaaaaccaatcttggaaataaaaccaaaaccaggtagttaaatgtatgagtccatcagaaggtgtattaattgaagtcaagtctttaatagtggcagataggccagtgtgtatttcatcctgagaatgacctcacagggatgcttaattcttgatgcttcatgctgcattttgggaaagcctcactgtgtgatacttttgaagacatgacaagagaattgcacaagagccatgttttctctgcttaattttgttttggttaacgcagggtgagtttcttactaggctcgcccaaactgggaattgcagccatggcaattagcagcaggagctctgtgaggtggcctggagaacaccctacagagaccctgctccacagagaccctgccacacactttacctgatgcctgtgacccgtgactagagtcgtctctgtgttgtttttcagaaggacatttgaaaaaagggctgaggatccgttattggtggatagtgatttcataaaataatgtcatgtatcttataaaacttcccatttgcatgtgtatgattttaattttgcaaatgcccatatagaccatgtaaacattattgtgttaaattaatagttattgtggatgtactcatattcatctcaagttttgtattttattgtaattttttttaattatattaactggttgattgcatagaaatgaaaatctattctgaattaattctactcagcttctgggcagcatattttaaagactttcagaagagagagcatcacttttttagtgaaaaacaagggtcactataaataatgtagtttaaaagcaataaaaatttaaaatgtttcacttattctggcatttagtaatgggtacttgagatttgccttctaacctgaacattctttagactaagaaatggccttggattatgtgcttctcgaaacatctgtgataaaggaccatttctttttccttttgaattccatcagggactgatacttttgtaagtgttgaggggagggaggtatcgtggcatgtgacctctaaaggaaggtgagattgtggcccataccttggaagacattgttatctctcctctgggatccagcaacagttgacaaacaggctggcactgagcctcagcttgtgctttgatgagctcagggctgggtggtgtttccagattccatccaggtaataaccacttccctgaaagttggtttcctcagcccgcctttctgtcccattttgcgtctccatcaatcccggtccctgtggattttccttcagtttcaggagattgtcgatgaatgacttagtcaatcccccctcggtggattgacaccagatcctttcttccctgatgttactgacaaacaccctgcaacttccagggctcagctgagttcaccatcccctccttatgcatcctttgagttgagaacatgaatgaaggaaacacagacagctgtttgtcctcacctgcctctcaatataacatttctcctaaatcttgtgtctcctgctggaatagcaggggtggaactttttaataatggtgaagttcttccattttgcactttttggaacaggctccagctccatgtggctaaattgctgtaagagcaaggaatgtttgaagtacccatgcaagattattttaagcataagaagttgattcattgaaaagaaaaatactcaactaattattgagtgcccactgtgtataaaatgttagtatccacgaattctgaaaattctgtgagtttcccaaacccatagaatgtttcagaatccgtcctgggaacagctacattccagctccctgctctcccgtaatcccgtcctgcctgccctttgctattctgagttcagagtattctcttagtaaaagggaccagtctcagtttattcagaagctacaagatgcttaaaatatataaatatatatatatatgtttatgtatttggctgagcactgtttcacacctgtaaccccagcactttgggagcccaaggcaggaggatcacttgaacccaggagttcaagaccagcctgagcaatatagtgagaccctatctcgtataaaaaataaaaataattagaaaaataaaaagattagatataaggaagtctgaagtttcagaagagttctgaaaaggagaaattatagaaatatgttctcaacaaattctccttttaccataagtgtctgtttggagtttctctgttcagaggccagtacctggacagggaggataccatgagaaacaagtaaccttttctcagtgcttccaaatcattactgggaggatgtgtttattttcatgtgatcccttcttccagccatcaatagacttactgtaagatagttttaaaaacaaacatgaagtcagagatggaaaaaagagacttgaagatgcatgataaaactcaacaagggtggcatgtcccaaataaagaaatgggaaatgggggttctgttggtttattcagtagaatttaataagcattgtctatatgctaataagtgcttagggtgagaacagttggaagccagggaagtccaggctccaagtgcagggagcttgaagtataggtgtctgattcaaacctgcgtcctacggaaggtcaggcaggctgatgctgttatcaagatcactcccagtttgggtgatagaactgaacctgggtttctttcccagaaggggaaattttggtttctgaatgttcttctgtcactctatcaagtgatggtacctcagttgcaaaagaaagcttgtattttttttttaacttctaatttttctgggtatgtcgtaggtatatatatttatagggtacatgagatgttttgatgtaggcatgcaatgcgtaataatcacatcatggagaatggggtatccatcccctcaagcatttatcctttatattacaaacaatccaattatactcttttagttatttttaaatgtacagttaaattattattgatggccggtgcctcatgcctgtaatcccagcactttgggagcccaagacggggtaatcgcctgagctcaggagttcaagaccacctgcgcaacatggtgaaaccccgtctctactaaaatacaaaaaattagctgggcatggtggtgcattcctgtagtcccagctacttgggatgctgactcacgagaatcgcttgaacccgggaggtggaggttgcagtgagtcaagatcgcattactgtactccagcttgggctacatagtgagaatctgtctcaaaaaaaaaaaaaaattattattgactatagtcaccttgctgtgctatgaaatagtaggtcttattaattcttttttttttttttttaacccattaaccaccccctgccacaacccccggcccataacccttcccagcttctggtaaccatccttctacactctgagtctatgagtttaattgttttgatttttagatcccacaaataagtgagaacatgtgatgtttgtaaagaaagcttgtattttagattttaaactcaacctgagtgacattaaatttcttttattttaaaaaagtgtttttatccaacaaagtttttattagaagtgtatttatagttactcttgtcatagtggagaggaacctgatatcaggagagggtggtaactcactgataggttgactgagtcctctaacaagaattgtttgaatacaaattatttgcaaggcatttgatgcacacccgaagggctgcggtcagtggtggagggtcactactctgggtttcacccctcagtcagtggagatggtttggcctatgtgtcaaaacttgagtcttgctgagtgccagataatgtgcacagggcagaaagaaaaatactaattcaaaacattagaatttcattgtattatatttataaactgttatacctctaaaagagtttttgggatcatcagagttttaaaataatgaaattaacttataaaacttgaatttaggctgggcgcggtggctcatgcctgtaatcccagcactttgggaggctgaggcgggcggatcatgaggtcgggagatcgagaccatcctggctaacacggagaaaccccgtctctactaaaaatacaaaaacattagctgggcatggtggcaggtgcctgtagtcccagctactcaggaggctgaggcaggagaatggcatgaacccaggaggcggagcttgcagtgagctgagatcacaccactgcactccagcctgggcaacagagcgagactccgtctcaaaacaacaacaacgacaaccaaaaaaaaccttgaatttattagaaaccctgtggtgagaattttaagactttgctgttactgactttatttcagaagtttattgcttctgttataaagttggcacatctttattgcagacaacatttttgacaaaaactaacagttaatttaaaaaattttttgacaaaaactaacagttaattttaaaaaaaattgtcttactattcatttcattggacttcagtagtcaaactattaaactataaatgcttgattctggcctgtaggatacctcttacattggtaataatatcctactttttggtactcaaaaattcaagctgttttgggaaaggaaactgaaagctgtttggtcccttggtttctgtttctaattttggaaatacacatatagaccatgtgtttgcttcaccttttattgccagcttttcaggtcatgagacggtacttctaggttctctatcttttcaggtaatgagacagtacttctatgttctctagctagcgatatgggtaatacccactacttatcaaattgagaaagtaaatgcacattttaaaatgttggatctatttttaaatacggactattgttaaattttagactgttattcctatgtccattttgtcagttaccttggcctcagtttcactgtcatggagctgtattgtaccttacatgtaggtatggctgtatgtgagaccagatgtcaggtgtggttgtcctgaagtgtttgtagcatactgctcttggctcttttctaaagaaattaatatcatagtttagttcttataaatgtgtccaactttatacatatttatataattctttccagagttttttttccccactctctctctctttttttgttttgagacggagtctcactctgtcgccaggctagagtgcagtcgtgcaatctcggcttactgcaacctctgcctcccaggttctcctgcctcagcctcccaagtagctggaactacaggcacgcaccaccacacctggctaatttttgtgtttttagtagagatggggttcaccatgttggccagactggtcttgaactcctgaccataagtgatctgcctgccttggcctcccaacgtgccgggattacaggcatgagccaccatacctggtcccccattctccattctttcccttcctctatcatacatattttctttaaaaccttttttttttccttttttttttttctgagacagagtctcactctgttgcccaggctggagtgcagtggcgtgatcttggctcactgcaacctccgcctcctgggttcagcgattctcctgcctcaacctcccaagtagctggatctacaggcacgcgccaccacacccggctaatttttgtattttaagtagagacagggtttcgccatgttggccaggctggtctcaaactcctgacctcagttgatccacccgcctcggcctcccaaggtgctgggattacaggcataagccacagcacccagccaaaaacctttcttttcttcagggaaagaaccctgttttataagttctgtcattcttcagctccccagtacccttttcccagatgaaatttagtttcagcaatgttgacattttgcgtgtataattgaggaggactatttgttgtaacaacagcaatggcatctaacatttattgagcaataactctgcatgctaatgatgtacagcattacccacgccacctcatgccatccttcaacagtgctaaaggagtgctcttctattcccgctttagaggctgagactcagcggttgagtaaacttgtccaaggtcaacatggctagatcaaggcagagctaggattgtttgacccccaatcctgaactcctcaccactgtgcttcattatatcttgtagaattaagccaaatacagttatgccagaaggaagtagttcaaatataccaaagtagtccaaaaaatcaaaccacaagtctgtctgcttcagtacaaaattagttgtttttctttttgagttttattgaaaatgaaaatagattaactggtaattttttaaaaagaaacagggttttttttttttaagaaggcatatcaggattagcattttttaaaattacaagtgtattttgagttcattttaattttatttctttaagacagtctcgctctgtcgcctaggctcgagtgcggtggcatgaccatggctcactgcagcctcaatctcccgggctcaagcgatcctcccacctcagcctcctgaatagctgggactataggcacgcaccatcacacctggctgatttttaaaaacaattttagtagagacaaggtcttactctgttgctcaggctggtcttgaactcctgggctcaagcagtcctcccattgtgacctcccagagtgctggtattatagtcatgagccaccatgcccagcctcaattaatttttaaatctgtcaacaatataataagtatcaattgaaaggaagccatttttttcttcattcattccatcaggtctgcttcaaggtctgtgactgaagtcccatgtggaaagtcccttcacactgtggggcagtcgttcaatctttgtagacatggtggagtggctaggtggagggggcacacactcaacaagtcttacagatttttccttcaagttgtctttgtgttctgtctttctgtcctactttttgtcttgtccttgcagtagtgtcttaacttacacacggtgagggctgcagttggtgccaggcagaggctcaccagtgcgtgtctcactgctgactctagatggtgtggcctcttacattcacgcttgagtctcaccctcctaaaacagatctggccatgtcattcccattgcgcaaaccatctgtggcaatttcttctgagaaaaggctgagtcatcatggcagtcaatgctgtctgcattttggttcttgtctattcttccagctgtatggctctcaattacattctgtctacctgctattccctgaacatatcctgtgcactctagctttgttccagctgtccttctgcctaggatttgctcccaacacatctgcatctacatttttgtggctttatttatacccctcttcagtggccctcagtttcctactacctcagcaggaagtagtcgtttgcagccttctaactccacgttgtcataccagttccttttttttttttttccataaatgcctttccttcttggaggttcactctgtgtaggcttctcctgcacattcatgaaggacacagaagggctaattcatgctattaaccacatggataacccttgtaagcatgaatgatccacatcattgaacatccacatggattgctatccaatcaatacctagcctaagctgaaagagctctcaccaaattctttgatgccagagaggcaatactcaatagcagttaagtgtacagtgtgctccagccagagactgcctgggtttgaatcatggtactgatgccagttaactatgatcttgtgaaagtcatgcaatctgtataccttgttcctcagtattttttatttgaaaaatgataataatgagagtttttatgtatagggtcattaaatatgttaagtgagttaaagcagatagtaacagaaacctatctggcacataattagaactcagtaagtgttagctattaattaaagtaatgatcatccatttcaattcacagacatatactatatgaccaggttagaatttacaaccctgaaatgtgctacctctgaaatgttaggtttcacttgttgactgtagcatcttatctcacccagcacctctgcatctttattcttgaattgtatccagaccatgagtgtcttacctctgccgttttctcccagtctgtcatcctcctgactttacttccttctctacccaattcttgccctaccaggtattctcatggaaccgtagcttcccctcaccaactgcaagaatagtgttcttgaaaagtaccacagcagccaggcatagtagctaatgcgtgtaatctcagcctcactttgagaggctgaggcaagaggattgcttgagcccagaagttcgagaccagcctggacaatatgccaagaccctgtcttgacaaaaaaatacaaaaattagctgggtgtggtagtgcacacctgtagtcccagctacttgggaggctgagatgggaggatctcttgagcccaggaggttgaggctacaatgagctgtcatcacatcattgcactccagcctaggcagcagagtgagatctcctccaaaaaaaaaaaaaaagaagaaagaaagagaaaaagggaaagggaagggggaaggggaaagggaaagggggaagaaaggaaggcagggagggagggagggaaggaaaagaaaaagcaaagcaccataggcagtgagatcaaagtcttagaggaaataaggggttaggagaaaaacaattagaaaatgacattaagcatatacttaaacttagtagattctgaatgatctacccagtattcttccaaaacaaacttggtggcatgtctcttgaatgaatcagcttcttcacatgttcagaaaattttactgtagtgattgtaggtttgatcatctgatgactctcttttttaaaattttcaaaccaggctttgtcttggaacttaaagtttttgaaatttgcattcttcttgtgataggtttcaaaggtcttccagatgcttatgtaaccccttctactttttataattcatagaagcatttgttgtatgttttcaatgtaggtaatgttagattattgatagaaaagtatataaacttatctccaaactacagttcataaatcctgattgaaaatggtacctactgtcctgcaaaacctcatccctataccatcatcccaggtctcactttctctgctaactgtagtctaactgctgagcttggcaacagaacaatcccatgagtctgtggccctcaaatgagctgtgttctctggtgatttttgcacagatgattccccctattgggataacatttctttggcttgtcagcttggtgaattcctattaagtcctcctaaattctgctccaggcgtttctcctccaacaaaattccctctttgcccagtgaatcccccgcttttttggagagctgctgtgcactttatattgttttgtgatatatgtataaaaaatcagtttcttgtttgaaagacaaaaagactaatttatttttgtatcccaacaaagtggcagacagtgcatgtgaaatgtttgttgactgaacatagctcttcattcctgtctctgttgtcacacttatcaccatccacttaatattaattattcatgtatgtatctgtctctcttgcatggttttaagcttccggatgtcagagaccatgcctaattcctctaaatattccctcaaagcactcctaatatgcattgtgggagttagtactcaataaatacttgctgattaggagaatacttagaacaggggtgtctgatcttttgacttccctgggccacattggaagaagaagaattgtcttgagccacacacaaaatacactaatactaatgatagctaataagcttaaaaaaatttttttaaaaaatcacaaaagaatctcataatgttttaagaaagtttgcaaatttgtgttgggctgcattgaaagccgtcctgggccccatgaggcccgtaggccacgggttgggcaagtttgacttagaagatttcgatgacctgtttagttctccaagttggaattgacagtcagaggcttcataataaggaatatgtccttaggctaatttccaggaggcaaatgctatttaactgtatatctttcagatctaggttgcagccatttccaacaattaataaagtattttaatacatgaaagagaaatttctggttcagaagatacttctctgatcacacacgtcgtagggcattgtacatcagggcctttggccaccaaacttctaagtagctaattatagtcaatatgctgtaaacagtggtcagaggactccttgacccagatatctttcagagtgaagtgtggggaaggaacttcagctgtttaggatttttattgctgttgttgcaacaggctatttatcctcctttattttagtcctccttattgaactttccaggtctgtactacctactaaattaagtacagacttctcctttcaagacctgtccaagtataggtccaatttatctttactgttttctttttcttttcttttttatttttaagtcacagtctcactctgtcacccaggctggagtgcagtggtgcaatctcggctcactgcaacctccgcttcccaggttcaagtgattctcctgcctcagcctcctgagtagctgggattacaggcatgtgccacaacacccggctaatttttgtatttttagcagagatggggtttcaccatcttggccaggctggtcttgaactcctgacctcaagtgatccacccacctcagccttccaaagtgctgggattacaggcatgagccacctcacctggcctctttttctttatttttattattttttttgagacagagtctcactctgtcacccaagtcagagtgcggtggcacgatcatggctcactataacctccaccttctgggctcacgggatccttctgcctcaggctccaatgtagctgggattacaagcatgtgccaccacacccaactactttttttttttatttttagtaaagatggggtcttactgtgttgcctagggtggtcttgaactcctggactcaagtgatcctcccacctcaagtgatcctaaccacctcccaaattactggggttacaggcatgagccacgccgcctggcaactgtactgttttctagtgttcccccgctccccccatttactctataatctcatcaaactgaacccttgctaagacacctagaatattttcatttaagtacttttgctaacaaaatcacctctattagaaatggcccacatccctgcctgtcagtcttccctgtctttgaagaccctttccagatcctctctcttcttgaccaccacatccccatccctgtgcctgcattcagctttgatcgctctgttctgtgagttcttgtgccattttgtttgtacctcttaaagcacttacataaatatatatttcaaaagtcacgtaaaacttatttttctctgataattgtgtatatttttaatagcaacctttttttgttcatcctaaattctagccatactatgtcaatacctgagattattgagctgctagatttgttgcaatatggaaatcccattgcatcctttaaaatacctttttgtttgtttatcaaaatcattgatacatttcccccaaaatatgttcctccaagaaaattctgttatcaaataagtttggggaatgctgctgttgaaatgttgcattgaatatgcaaggagagtaacaacatatattagcatgtcaaagtctctgaaaagtactgccataaagaaacccatatttaactgtgctcagcagcatttctcaatttagttgatgtcagaagctttttaagggcttgacctttgttaacatcccgttcaatttctatgcttgtgaaatgctggtctagagaaatgattatttttaagtaagttatcagaaatattctgcattttctgacagtctctgaagtcttcactgctgttaaatgcaggcagtcttgccccaaaattgtaggattgtggtggtgatttaagtaaatcctcacaactggattatgtttaactcactaatgtaaaaaaattatttctgagttcttattctgtactcagccctacatgaatagatgggattggggacagggattatataccacgtgacctggcctctgttttcaaggggtttacatcttaaagatatatgagactcaaatgcagacagttactgaaggcatcagaactttatgtgtgccaataagtgctaagctgttttgtcgaccctaggagtcttgggatagtagaagtagtgaaggccaagatagtcttcaaggctggtgaggaattgagagagctgagccttgaactgtgtcttcaagagtgggcaggtatgatccggcagagtggaaagacaaagtggggtaaaggcatgtaaattgcatgagttgtgtggtaaaaactcatggtgtgggtgacctggaagagatcaaactgcttgtcctggaagagaagaagagcttttgtgttttacaaaaatagaactactatcaatgtggaaaataagaactgtctctccttattttctctccaaatcctggaacctagaatgtcttctaaaatgtcaaattgtatttagtttatttatttggaatatacaaaaatactaatacttgaatacttagagaagtccacatgattaaaagcaaggatgttttggagaatgaaggggaggatgggcattggagagtggtcagaaataaacacacctttaggcaagtgttagtgaaatgctgttttctaaggagtcagcaatcaaacctatgtgtcggggtcacttaggtctgtttcaagggatgttcttttttggttcactagatatttactgaacaaaatcattgcctctttctgtaatgaagccacacaggtatctcaacagtagtctgtacttgactaagagtcatggctttgactgatacaatcaacaaaaggccatttatttatttttgagattgagtcttgctctgtcacccaggcaggagtgcagtggcgtgatctcagctaactgcaacctctgcctcctgagttgaagcaattctcatgcctcagccttcctagtagctgagattataggctcatgccaccatgcccagcccataatttttaaaatatgtgtttagtatggtttatgttgaatctgatagatgtttatattattcattctcatttcatttgttttccatattgttaaaagatgaatttggcacattaaaattttaaataatttatttgtgcagatagtgattcatgatttgggcagctccaaaatggaaggggtttgggactccactgaaggggcatgaagggaaagcttttgtagggtgaactcagaaggcaagcaaataaattatttgattggttaaagtttgagtagttattttatttgtactgtcccagtggaaaattcttgattatataactaatgctcagttggctgctggtgattggcagtgattggctgagtttaagttttgttttgtttatgtagaaacccaggaccttgaagcaatctcagcctgttaagtttattttagtagtttatatatatgaaagcgatgaagattaagataatatttcataagtatatgaatttttttatttttacattgtaatatcacattttttccctaaaggatagcatactatatttgattatagtgtcagtattactgatactggaaacatttttcttcacaactaccaaagaaggacatatagcctctagagtttggggcagtaaccttgagtctgagttaggatgagtgagcagcccatcacctcatgcaggataattttcttccctgcactcaaaagtgtagaattatgcatgtgattggaccttttttttttttttttttttttgagacagagtcttgctctgtcgcccaggatggatggagtgcagtggcacgatcttggctcactgcaagctccgcctcctgggttcacgccattctcctgcctcagcctcccaagtagctgggactacaggcacccgccaccacgcccggctaattttttgtatttttagtagaggcggggtttcaccgtgttaaccaggatggtctcgatcccctgaacttgtgatccgcctgcctcagcctcccaaagtgctgggattacaggtgtgagccactgtgcctggcccctggactgagctctcagttttgttcgagtcccttagaaaccttaagaaaggtgtatcaatgaatgaattacagggtgtatcaatgaatgaagtacaggttgtatcagtgaatgaagtagaggatgtatcaatgaatgaagtacagtgatgatgcactacagggtttacttttccttctgtagcaagggtccttgttctaaaatgaatgatgagtaagtttgggtagcagcagatgagctttgtggcttcccttttttcttttcttcgcagtctcaatttgttcttaacaagcatttattcagaaacacaaaagaaggtagcagaattatattggtattcccatgttatgggctatcttctaagtgagaaagacttttaaagtgcttaaaatgctgaaataggattggttttctaagaagaatgaagaaaaccttcttggaatgtcaatgaagaaaggataattttgttattgacagctaagaaggtgaacgtactactgactacaaaccagcactggttcattgctgctggtggtggttattattgtgctgtggctgtggcataaagggcacataagagaactccagagagctcactgggattcccctagtctgtcccagccccgttgggttactgggttcatcataacataaatgggaaacctatatttaattacctttggtctgtgctgtttcatataatggccttattgtaacccaagtgacttttctttcctcttttaaataaagcagtgattttcatggcttttaaagaataaagcaagcaaaatgagaaggtatagtcaaaaatatggttcataaagttttattattgttctaccttcttagaactgaggccttcctgaattgtcttccacttaaggaaattttcatggcagaaatctcaagttttttgtacagaatggaaatccatgacttccttagaattaaaaacacttgtgcatttttatttataacctctataaatgtttatcttgttttaaagggtagacatacaaatatgttgagacttgcttgatggcagccagagataccagttattctagttcccctctaaaacctgaagacaaaaatcacattcccattgtgtctgtctgagggaatgacataaggcaataagggctcattccctttcaactaattcgtggaatttcaagaaaatggtgtttcaacttcatcattataggaatgggatgatttttcttccctgcactcgaaagcgtagaattatgcatgtgattggacattttttttccctgctactgagctctcagttttgttcgagtccctcagagctctgtaaggagtgttgcacccagtgatggagaaaaagcatcctgctgttttgcctatacctttctgtgccctctgccctggaaaatctactttcttagccccatgattctatttcctatgaagaatgattaaagccatggggtaaatgcccccatttctttttcacagtaattttatagtttatgaattgaggatatcagaggttgatcaagagtaactatcaggaaggccaagaactgtcataagattgcataacttagaaatcataattgagctccttaattttatacatgaagaaaatatttacaaagcaagtcaaactgacattttattgccttgaaaactgtttcctagccaaatgcagtggttcacacctgtaatcccagcactttgggaggctgaggtggggggattgcttgaggtcaggagtttgagaccagcctggggcaacatagtgtctcttaagaaagtaaaaaattacccaggtgtggtggcacacacctatagtcctagttatgtgggaggctgaggtaggaggatcagttgagcccaggagttcaaggttgcactgagccatgatcacatcactgcactccatcctgaacaaccaagtgagaccccatctctggagaaaaaaagaaagaaaactatttccttttcagagttttttccaggtgcaatttcagtcatttctgagttattaacgtgtaaaacaaacgttttaacaagtgcgtgtgtggctgatggtggggaaaaaatggaaacttgcttttaaatgtctattcagtgttaaaatatatgagttatttaaaaccatggtttttaaatgagaaaaactcccacatatattatgttagagtatatgtatttatcaaaggaaaatatgcatatattttaacaaaaatttaagaaaaatttaaatataaaaattgatttaaaaatatttaatcacatgcagtaaggattgtggcatctttctttatcttgatgctcttcctttggcatttcttaaaagtcattaaaaatatctgaatgattgaattcattctgtgcaaccaagagagaaattcattatgcccataccatgtttttgagcaaatattgagtttatcacttcattcagtaatgtgtttgaatttggcttctgatcttcatgaagaagaatatctttcagatcatgttatcaaggtgctgaatttaccttatttttttctctttcattgtttccctctgatgtggctgctgtgttgacaaccctctgtatccctgctgctgaattttttttttcccatcattaaggaaacctcccaaggtaagcactaatatgaaatttggcatgtatactggcttagtgtgcaaaaatccaggatttatcactgtaacccatgtagaacatctgtctcattgagaactgaaaacagcatcctaatttaaaactcacatcatgaacaattaatatcagtgttaacataaagttagagtgtcactctacattgacagagcactttcacatattatttcattctcagaatgaatgctgtaatcttcaaagcaaacctgtcaggttattgtttctattttcttgatgatgaaatgagactcagagagatgaaatagcatgtcctaactcacagattgagtgaatggaagagctgggactgcacagtatcaacagcctagaatgtggaggaacaactatggtaagatcataggatggcagttggtaactgtgattactgattggacaaacgatcttttcctgtgccccaataagattagttgttatcattggaaaagttcttcacacttttaaatagagattcaacattctaccaactttatatgcctcattggagttcctagcccatcacaatggccactagttagttttttccccacctgctctggccaacctttgatggcatttttaccagtgagaaggccagaagttagagaatagttagaggagggaagtgggggaatatgagaagtaaggaatctgaatgaccagcccctgaataactgaagattgattttgttaccagtgagcattttgctgagtatcagagggacacttagcaccaaaaggagtgagaaatttgaccagcccctggccagtgatactgattatagctgtggttcttgagataggattagaacaggctttacctacacaaattatatggtcagaatctaagacaagttgggtgacggcatggaatccagaaaagacaaagcttactttcccctggggttatgaagaacaatccatcttagctcttggattatggaaacccattaaaatgctgctgtataccttgtacttattgaagacattgtccttggcaataagagtttcagctttagcaaggaaggcatgcattgaacaaatgatataagatctgttaagaaagaggaaatatataatatattagaaaagtattggcagtggcattctggacaaatctagggaatcaggagattctccccgagcaattgtcgacgtagatataatccctaaaactggtctctactggaatgtataagtgccgtttatctagcttttacatcccttgctgttggttccccaaagtttcagaagagtcagtcttgtagtacaaagtattcccccacagaaaaataccagtgaaatactgcgcaactccacatatgcctgcttagtgaaggaaaagcactgaaatgaaaaagagacacaaaaacatttttaaaaaccactattgctttgtacacaggaatgttcttgtcactttctagtgagtatatatagcctagtggttcccagccttatttttgctggatatcctattgatcgttcctaagaagtgtcatgaaattttcaaaataaaattaacgctgaatcacaatgttaaacaatgtgtatatgcatgccataaggcacatctggaaagcataaagatcatcttgaactcaaataaatgacacaatagaatcaaataaagatggacacaaagtagatataggcctttcctcatagaaactatgtaaatgttgaaagaaagtggaaaagggaaaggtgcttttaatgatgattatgtaagaataaaattttatttaaaacgatgagatttgggcataagcaatcaaaagcatcagagaagcctggttgtttcgatttaacaaataattattctgggcaggggacaggtgctgcatgagtcagacagagctctagcattctaatgggggtggggggaggggaatacagttgacccctgaacagcacaggtttgaactgcccaggtccacttatatgcaaatttttttcaaccaaacgcagttagaaaatacagtattcgggggacataaaacccatgtatacagagggccaacttttcctatagatgggttccaggggaccaacagagtaggactggagtctgtgtggattttggtatacatgggggttctagaaccaattccccacatataccaaaggatgattggtatgtgcacaatataaaattgattatattaaagaccacaagaggcaaaatatttgtgaaattcatagaatgaaagttcctgttcagacttctgctgtcagaaatgacaaactaggtaattagcattgccttttccactgaggacaactaggactggacaaaatattaaaaacttgtgcttgaaggcactggagataagccaagttagtgaggaattactagaccaagatccagaaagaggtaaaaatttagagagatgaacctagcatttagatatatgccattcaggaaggagcggcttaaagacagagcaaatgcatattgctgactgctttgtggggctgaggaggacaaagtactggagttcaagtccttccagaggtggagtccttgctaatctccttatactttgggttggtaaagtggattgagatgcagccaggggtagggtatgaaggtgaaacagaggtaaaccagccatcacatggattgttgtgtggttccaagccatttgtatgatccaggaagtctcaagcacaaaaattggaacaaagtgataccagaatgcaggtgcccataggcacctggcagaagtaaatgaaatcctaagtctttagtgattccacaaactgttttaaaaatacaatgtccaatacaccatcaaagttaaggaggtacatgacaagatgtgacatgaacaagagccaacagaaataataaaaattagaaatagacccatagatgcttcagatgaccaaattattagacaagaacttcaaaatgaatatatttgttatcttcaaagacataaaacataagattgaaaaatgttggagagaactagaagctatagaaagtggcataactgatttggaaaataacccaatagaaataaatcctcaatctgaaaaacccaaaaccgaaattaagaatttagtgcaagggtttagcagcagatagatccagctgtttttaatcctttcttaggaagatccaaatgcctagctggtccagttgagttaatgataactcagccatggttgagttaccattattcttacccaactgttaatgcaggaaaggtctcacatcctttctatcaatccctgggattgtactctctgagtactattattagtaacagctgtctttaatagagagggagttgggatagggatgaataagtaaagcataggggaaactgtactgtgtgatactgtaatggcagatatatgacattatgcatttgtcaaaattcatagaaccatacggctcaaagaatggatcctaatataaaccgtgaagtttagttatgaataatgtatcaatattggttcatcagttataacaaatgtaccacactaataaagatgttaataattggggaaacaattcttaacagtagggagtggggacaagcgagactatataggaactctgtactatctgccgaagttttttgtaagcctaaaacttctgtaaaaaaaaaagtcatgattatgaaaaaatcactataattcttattaacagaatgaaaaagaaaaactatgtgatcatatcagtaagatgcagaaaaaggccaggtgcagtgactcacgcctgtgatccccggccttgggaagccaaggtgggaggattgtttgagactagcttgagcaatatagcaagaccttgtctctactaaaaataaaaaaagttagcagggcatgatggcgtatgcctgtagtcctagctactcaggaggctgaggtgggatgatcacttgagcacggtaagtttaggctgtagtaagcttgatcatgcaactgcactccagcctgggcgacagacccctgtctcaaaaaaaaaaaaaaatggggtgagacgcagtggctcacacctgtaatcccagcactttgggaagccaaggtgggaggatcacgaggtcaggagatcaagaccagcctggctaacacagtgaaaccctgtctttactgaaaatacaaaaattagccgggtgtggtggcacacgcctgtagtcccagttacttgggaggctgagacaggagaatcacttgaacccgggaagcagaggttgcagtgagccgagattgcgccactgcactccagcctgggcgacagagcaagactctgtctcagaaaaaaaaaaaaaaaaaaaaaaagatgcaggaaaaaaagcatttgacagaattcaatgtttatttatgaatttatgatacaaacttgcagcagcctaacagtagacagaaacctcaatatgataaaaggcccatgagaaatctacatctgacatcctatgtaatagtaaaagactgaatactttctgcctaaaatggggaataaggcgaggatattgatctaaccacttatattgtgcattgacaggaggtcctaggcagtgcagttaagcaagaaaagaagtaaaggaaattcaagatggaaaggaagtagcaaaagtatatttacaataaggtacaataaggttgtatacttggaaaaccttaagaaatctgcaaacaagctcctgcaaggtggcagaaaaaaggtcaaaatatatttctttatactatcaataaacaattcaaaaataaaatttttaaccatcaaaacatcaaaaacattaaatacttgggatatattgagtgaaaaacaggcagagcttctaaaacccacatttggttatttgattgtagacagatgtgccaagacatagaactaggaaagtgtcagctgtgctcaggtaagggcaaggcatagagttggactaaaggtacatgaagaggaatcctgggtgactgaactgtatttacccacagcactcttgacaccaaatgtatggtgttttccccagcaccagtaaattctccaattctccaaaatcaactgagtgccctactatctagttcaattctggcatgttacctggagttagcacagacctacaggttaggggctcagtcccataaggctgcctccactttagatgccattcgcaagtcccaggttgccacctatacttctgacctaccggctataaatcaagagttcccgtgtccccctcctcaggttccataatttgctagaatggctcacagaactcaggaacgccctttacataatattgccagctttgataaaggataaaactcaggaagagtcagatggcagcaatgcatagggcaaggcagcatgaagcctctctgccctttctgtgtgtactgcccttccagtaccttcttgtgttcagcaacccagatgctctcccatccttgtagtttagggatgtttatggaggctccatcacataggcataattgattgaatccattgaactcagtctctagtgtctctcccctcccagaagtcaagaattgggctaaatgttccaaccctctaatcctgccttggtctttctggtaagcagccctatcttgaagccacctggggaccccagccaccagtcatctcattagcatacaaaagacactcttatcactgcacagtgatgtatcacccagctgtggcaggccttgatgtcagggttggaccttgataccttcagtgtctctattgcctgttttgaacaaagcttgatcagtagggaggctagtggtagtattcagtaaaatacatcagaaaaaaaggaaataagggtttgcacaggagcagtgcccattagagcaggaaagaggaagggaagaattacgaaaacattacagaaataaagtaaccaggactttgatgctaacagcatataggagaagacagtatatcaagagtcagagatgtctcggatttgaaactgagtgaatgaaaaatcaaatcaacataaactaaagaaggaagagctagtttggttcagtgggaagttgattacgttctagagtgggctgagttggaagtgatggcagccatctgataggatgcttagcaggtgatacgaatttgccgactctgccttacaaagatcaggtaaattattggggtgaagagagtaggaagtggaggaagaggtatctcttgtcaaggaaaacaggattaagtggaatagaagacatgagagaatagaggatagcaccttgggactcactctgctttggagaatgaaaagaggaggaagaaccaatgaaaattaagaaaagccatggattcatgaatggtgctgttggtggtggtggagttgagaattcatacacttgttctccccaaattgggtgtctttctttttttaagagacagggtctcaccgaggctggagtacagtggcacaatcatagctcactgcatcgtcaaactccagcctcaaactcctgggctcaagcaatcctcctgcctcagcctcccaagtagctgagacgagagacatgagccaccacacttggctaattttttaattctttgtaaagatgaggtctcactctgttgctcaggctggtctcaaactcctggcttcaagctatcctccttcctcagcctccccaattgggtttcttttgttcctaactcttaaaaattattttttctaagtgttgtgttagggcaaggagaagatgaagatattcttccagctgagttttaaaagttagatttaaatttttttatgtagcatgtgtaatgtaacatgtcagaatacaagggaaatgtacataagtttctgtctttataaattgctttgtaccatatctttgggtttttctctttgataaatgttacattttgtaaatttgcactcttgagtggagaaacatttatttcagcataagcctcatgcataccttttagtacttttaccagttgtgtattatgatgtagtatttatggaagtgtgttttgtttcttttaaacagaaaagcaagcttttgggcaaacatgagacatctgcttcttacctctctgtagtttacagggggaaaaaagaggctttgtctcataatttgtaggattggagtgtctttccttctcagtgtgactgtagttttgagtctgaggtttttgtctgagaagtatcgcagataggtgtaaattagggaaattcgactgggtgtggtagctcatgcctgtaatcacagcactttgggaggctgaggcaggaggattgcttgaggccaggagtttgagaccagcctgggcaacataaggagaccttgtctttaacaataacaatagtaataataacattattattattattattattattattagctgggcatagtaacatgtccctgtagtcccagctgcctgggaagctgaggtgggaagatcgcttgagcccaggagtctgtggcttcactgaggtatgattgtgccactgcactctagcctgggtgacagcaagaccttgtctctttgaaaaaaaaaaaagaagaaggagaagggggaaagtgcttgttagtttagccaccttctgattaactttggattttggcaggaggtggtgcagaggaagacgacacttgtgtggagaatcactacctaattatgccattatgtatgctctattgataggtacagggaagtgtcctcagtcaaagcagctctgcctgcagaagcccagtttctgcatccccaggtggcctcagaatatctggcatgttccaagacccctcacttgtcatggttttgtcttatctgggtcaagtttctttccttcctgaggagccacattgaaacacacacaggaataaaaaaagaattcttcctcctttttttcattttcttcttctgtccctcaagatttattcagaaccttctatgtcccaagttagcagtacatagctagaagagatttttttttttttttttttgagacgaagtttcactcttgttgcccaggctggaatgccatggtgcgatctcggctcactgcaacctccacctcccaagttcaagcaattctcctgcctcagcctcctgagtagctgggattactggcatgtgtcaccacgcctggctaattttgtgtttttagtaaagacagggtttttccctgtctttcctgtcaacaggttttccctgtcaacaggtttctccgtgttggtcaggctggtctcaaactctcgacctcgggtgatctgcctgcctcggcctcccaaagtgctagagtgagccacaatgcctggcgctaagagagatttttaaacttagatgatttaaatctttttattcaagaccaaggagactgatgcttaattggctaaaccgtccagggggagagcttggctacagtctaggcctcctgattgccagtcaggtacagtccaggatgatctcagcatctgtggattttggtgtcctcaggggctcctggaaccagtctccaaggatacagagggacaagtgtattttctttgacatcatatgattgtaaatgagtttttctatgtattggattttatgtgccaagatataaggaaagagtaagaagaaagaatctgagggaaaacatataaataactgaaaaatcactttgtgtaggatcatattcttttttactcagtttgctcattttaaactcacaattgttttgtttagtatcttataatttcatgtacggtttatttgagtgttagagcttgtgaattaaattcactttcggtgttttttgttttatttatgagttaggttactgaacttcaaggtgtttgatctcacttctatgtttataagtttttggcaaaattgtaagctgaagaaattgactacattataacaaaacaaaactgttactttttgaaactgagtcatttgaagaagcacacagatacataccaaaaacctgcctttatgaaaattgctcagaaaaagtaagggggaaaccttattaggtacagcttatgccatctgaaatgcaactttatttagtctagcttcacaatctgtgactgccttcattttctgttgcctctactgttttgctactaagcatttggcctcaatgaggtgagttctagacctgtactattcagtacagtagccatttagccacaagtggtttatgaacatatgatatgtgactggtgttgctcgagattaagtacaaaatatatgctagatttagaagacttggtacaagaaagaaaaagaatataagattttttatatatttggttaaatatattattatttttatattaaattatttcatctctttttacttttttgtttttttgagatagggtctcactctgtcacccaggctggagtgcagtggcacagtctcggctcactgcaacctccacctcctaggttcaagcaattctctcacctcagccttccaagtaggtgggactacaggcctgtgccaccacgcccagctaatttttgtattttttggtagagacagggtttcaccatgttggccaagctggtctcgaactcccggcctcaagtgatctgcccgctttggcctcccaaagtgctgggattacaggcataagccaccatggttggcctcttttacttttcagtgtgtctacaaaaacattttaaattatttatatggctagcattatatttctatgggacagctctgtttcagatcaaacccatggcttagtactgaacaccagtatacttcctaaggcttttgcttgtttcattacccagtcaaatgcagcagacctaccttgatcttttacatttttacttttatatctgggtccaggagtgttgcagctgcatgaactcaatgacagcataaccttctcactatacgtttttcctaggaattgtttcctaggctcaagagtgactaaactagtagtttttgttttctagaattcataacatgataaggaagattagatatactataatctaagtagtggaaaatagattatggtaacatcatcattcactacttcagtactttgtgtcttgtgtcttctgaggaagaaggcttcatagctaaacatggaacttcaggaggcctgcaagtatggatagggtgtcaaagtgcagaaatttaggataagaatcaagatgcaggggctgggcccagtggctcacacctgtaatcctagcactttgggaggctgaggcagacggatcacctgaggtcaggagttcgagaccagcctggccaatatggcaaaaccccatctctactaaaaatacaaaaaaaaaaaaaaaaattagctggacatggtggtgggtgcctgtaatcccagctactcgggaggctgaggcaggagaattgcttgaacctgggaggcagaggttgcagtgagccgagatcctgccactgcactgtagcctgggcaacaagagcgagactctgactcaaaaaaagaatcaagatgtatgtaaaggaagacaaacaagaaagtaattgacgtattaggaaataagttgcacactctggttaaagtgtagagtacatgaaaggaagatcgtgttttaaaaaactgggagaatgtagtttatagagcattgggagtctggacttaatctggtaggctatgaagatcatttaggatctttatatagaaaagctacatgatcagaactgtgcttgcaagaaattcatacggctgcaagatagaagataattgataagtatagaatgtagggtggataataatctaggttcattttaaaggaactgccttgtgtgtgaacctgcttatgctccgtgatgcaacagtaacaaccttaaatgttcaatggctagaaacaacgaaaatatatttccctgatgttacatgtcagccgaggttccctgtggctgtataccatatgacttcaatctgggctccagattgaaggaacaacccctatctgggacttgctaatactgtgacagaggggaacaaagaaagagaactgtgcagtggcttcttaaagctgttgcccagactggccatatgtcactttgttcatacttaattggccaaagcaagtcacacagctaagcctgatgtcagtatggtgaggaattgtattccttcctactacaggcactgcatgtcatgtggcaataggcagggatgtgtaattcccttaccaggagggccaggaatcatttggaacagtaatgcaatataccacactttgtcattataaatcatccttctaaaaatttcccaagacttttttttttttcctctttttaacaacgacaacaaaacaatcctcagaaacatagggtggtggtggtggttgttagtagttgtggttgttgttgttgttttgagatggagtttcgcccttgttgcccaggctggagtgcaatggcatgatcttaactcactgcaacctccacctcccgggttcaagtgaagtgctgtgtgtttctatcttgaaattcctacaggttctactctcccctttccttctgcccgactttgttcagaaccaaatgttctcactggaactctgtgcctttagatgtctacagtaccactgacggagtaccaggtcacatggagtataggccccaggaagaaaagatatccatctcccttgtctcttggtgttgatccatctccctgtctagaatagtgaaagccttctggaccagggagtctcttggctcccacttggcccgagtcagccgcagcagtgtgaactcttcatcagtcctttgcagcgtaacttaactgggagtaaatgtttgcaacccctggactgcctcaggtcctttagctttggtgacctggggccatggagtcagcctagcattctcctctctgtggctctatgtacctggcatggtgcagtgaggcagaggggactggagagataggcacaagaaatgaggtcttggtccagaagttctgagccagacccagagattgctcatggtgggtgatattagcatgactcagatttaatctaggttttatttttcttctcatttttatgagtaacaataatcatttatcagagatagcagataggatctgatagcagatgcttagacatttgcaacttatcttttggactgtttttattgaagaagaagtattctgtgtttgaaaatatccacatcacctttgaatgtgctgttgaagaagttatttgggtggctaggttttttgagaagtgatcaggatatgaaagaactggaaataccacagattgtgcatttgtgacactccgacccccactcctcagccaccagtgaagcggattttgaaaatgaatgatagaggattaaatatgaaatgagtagagtatttgaaagagttagaactgaattagtgcttcattgcttatgcaccactagtttatgtgtgcagtgttaaatggaagctctgtgctgttataatattggtctgggttttgggaggatgatttcctgttttcagatttattcattaaatgaatgaaagcatgaattagctctttgtagagataccttctccttgcatccatagaaatttgaactgcaatgcagagtagtattttccaaggatagttgttttctagaacagaccgtgcattccctgagatcagggacaatgccttgtagatgtgcagcaaatgctgttggctttgaatctttaagaggctttcacatcttcacaatcagtccatgccgactgtaatgcaagacattatttggtatgtatctataggcatatgtaaaggaaatgattaattacattgccaaaagacagctgttacttgacatatgtttaaatgggaaggtagatctgtcaataaaactcaccagtaataagggtgatgactctagcattccttaggagatgtgttcagatacatgctggagttcctcctggcagagctgcttttagaaaagcagtagtgaaggcagttctgtgatcacacaggctcttggtgctggggtttcctttcagtttcagtccagttcctctgagatgaatgaagtttaactcttcctttttttcttttatgaatcttcacaactttgatatcaggagaaagatgaaaaagagaaaagcattgaaacttggcattaaaagaaaaatttgaacatgaagtgaaatctagaactttacttggtatgactcagtgctcataacatggtgtggtgaaatgtgaacacatttgaagtgtcgctttcatattaattgtagtctttcaaattgacaaagttgaaaaccacaaaacaggacattggcaagctaatgttcctaaaactggagaaatggggcttttcagagagctctggggctcagttttcaaagtagatagtggcagaacaggctgttaatggcagctgggtctgcagatgtgaacagcggattaattgtacaaagagaggaagaaggcagtgtagaggagaggacacactccttcatacaaagcaaagcaagtccacatagagcagacttttttccccaagggaagcccttttggttttagatttgggcgctaggaagtagtgtgttttgcattgatatttttgacacagaaccaaacagtctgtagcaactcccacacacatggccttttttgccttttcacttctctttctatttaattcagcaaatactgagtacccatctacactatcctgtacctagagagaataaagatgagttagcacagtccctggctcagaaaaccttccagcttggtgagaatataaagtatttaggttggtgcctggtacataacaaacgctctacagcagtagctatgctattaatgggggagcgaagtccatcagtacataatgataatattgataacagtagctgccatagactgaatttcactgtgtgccaagcattatcttagtaggtattccatttatgttaccacaatcccaaattaatgtaaaatgtgcagttacttaggtagatgagtgtgtgttagagagggagagctgttggctaagacagcccagaggaggcaataattatagggaggaagttgagaaaacattggaggaggtgacatttgagcaggtcttgagtagtgtgagttgtacttcactgggcagggaggcaaggtgaggaaaggcagagaattacaggaaggagaaattccctcatagttctacattcctttctctttttttgttattattatgatttccttctctttttttgttaatattattatttccttttagcaatgggatctcactaggttgtccaggctggagtgcagtggctattcacaggtgtgatcatagctcattgcagcctcaaactcccaggctcaagtgatcctcccacctcagcctcacaagcagctgggactgcaggtgcataccattgcacctggctctccccttccttcttcttttccctagacatctcactgtgttcaatatacccaaaggatttcttgatcattggtggaatctctcagagctgagaagttggctgaccattgacgtaatatacagatgaatagggtcatttcttatgtctttttgggaaagcagtgggaatccagtaaacacaaaaataatgcctgtagggtgacaccagtctgttactgtggcagttgaagtaaaaatggaggctttggcaaagtatcgttggggtgctgctatcctggctgtgccactgaaggatttacactgactgatctgtgctattttaagcagatgtcacatgtgaaaacagatttacatgattgattaagaggtagttagttcaccaggaagttgccttatttttttttattatttttattttattttttagagacagtcttgctctgtgacccaggctggagtgcagtgacatgatcacagctcactgcaggcttaaacttctgggctcaagcagtcctcttgcttcagcctcctgagtatctgggactataggcacatgcccctgcagctggctaatgttattttttgtagagactatgttgcccaggctggtcttgaactcttggcttcaagtgatccttcagtctcagcctctcaaaacactgggattataggcatgagccaccatacccagcaaaagttgctttaaaatgtaaattcgccgagtatttttggtaatgaaaagattagggaaaccaaggctttatcctctaagaattaatattgtagcagaacaaagggaattgtatataaatagatgtatacatatatatacacacatacagaatctgattagacagatatggaaattcaggataatgagaaatagtatccttaaaagttttataagcaggccgggtgccgtgccgcacgcctttaatcccagcactttgggaggccaaggtaggcaaatcacttgaggtcagaagttcaagaccagcatggccagcatggtgaaactccatctctactaaaaatacaaaaattagccaggcgtggtagtgggcagctgtagtcccagctactcaggaggctgaggcaagggaatcgctcgaacctgggaggcagaggttgtgctgagctgagatcatgccactacgctccagcctgggcgacagagcaagactccatcaaaaaaaaaaaaaaatttataaaggagtgacatttgagatgacattaaaaggaaacaaattaaaagggggtaggttttggctcactttgcaaaaatctgatgtatatgtccagaaatatttctttacataaaattaaattatcttgacataataaatattaatcactttgtgtctgaggagggtttctgagaggtattaaaatgattttagggaaaaaaattacttttcttagaaaaagaatacttgttttgtgttttgcctttttaactagactgtaagcaagaggatacaaacatgcctagtacatacttgagttccctgtagcccctaaaattgaaaaaggtaacaagtgggtgttagtttattgctttccagattgaccattttgcagttggagaacatattagtgaaagcacacaactcgaaaggacaaatgaaaggatacagagataatgcagttgaaagcaccttcacatctcgtttttatggatcagaaaaatggttacagattacatatcttaaaacacagatgccttctggttctgcagggaacatagaagatcttacttctttttttatttttttgagacagagtcttgctctgttgcccaggctggagtgcagtggcacaatctcagctcactgcaacctcagtctcccgggttcaagcatttctcatgcctcagcctcccgagtagctggaataacaggcacatgccaccatacccagctaatttttgtattttcagtagagacaaggtttcaccatgttggccaggagggtctcaaactcctgatctcaagtaatccgcctgcctccacctcccaaagtgctagggttacagccgtgagccctgtgcctggccattgctgctgcttttttttgagacacagtctagctctgtcgccaggctggagtgcagtggcgcaatcgcagctcactgcaacctccgcttcctgagttcaagtgattctcctgcctcagccttccgagtagctgggattacaggcgtgcactgccgcacccagctaatttttgtatatttagtagagacagggtttcaccatatgttggccaggatggtctcgatctcctgacctcataagccactgtgcctggcctttttttttttttttaactgtaaattgacttttgctgaaatgccatcagagatgacttttaagtaaaagtggagtttaactgtactacatcctattcgtaagtcatggaacttcattacctcagattatatatatctctcaacacatttgccttattaaaaacagctttagtaactttattagatgttcagtggttcacaaaaatgcaaagctaacatttttaagagcctgataaaggtggagcagatgtaccacaagctgcagggaattaaatcctggtatgagttttataagttgcaaactaagaggaaggagtgggattctgagaaggtggagtcaaattttgttgaaaacagtgaaggcaatagctttcagatttcaaaaacgactacaaaacatctatgcttttggctgttttttccgttgaaaagctatgaatgcctttgcaaaaaaaatgttctcacaatgttggttcttattgataaaatgtaaaatttatacttggttggcattttgttgttttactcagctgtatgcattaagaagtctgctgggccaggtacagtggctcagcactttgggaggtcgaggtgggagaattgcttggggtcaggagttcgatactaacttgggcaatgttgcaagaccccatctttgcaacaacagcaaaattagacaagtatggtggcatgtgcctgtagtcctagctactcgggaggctgcttgagcccaggagtttgaggttacagtgaactgtgattgcctcaagccccactgcagtctctggcctggacaacagagcaagaccttttttttttttttttttttttgagacagagtctcgccctgtcacctgggctggagtgcaatggtgcgatcttggctcactgcaacctccgcctcctgggttcaaatgattctcctatctcagcctcccaagtagctgggattacaggtgcgtgcctccacgcttggctaattttttgtatctttagtagagatggggtttcaccatgttggtcaggctgctcttgaactcctgacctcaggtgatccgcccgccttggcctcccaaagtgctgggattacagctgtgagccactgagcctggcccaattagaagtcttaaataacatttttctagtataatatggtgggtttgcaaaaaataagactttatttttcttcagtcatcggtttctggccagccatggtggttcataactgtaatcccagcactttgggaagccaaagcaggaagatcacttgaggctaggagaattcgagactagcttgggcaacacagcgagcccccatctctacaaaaaataacaattagctgggcatggtggcatgcgcctgtagtcccagctactcttgggaggatcgcttgagctgggaggttgaggctgcagtgagctatgaccatgccactgcattccagcctaggtgacagagcaagaccctctctctaaaataaagtttttaaaaaattagaaaaaaacaaagtagtcagtttccaaggaataagtcttgagaaattggttttctcccttttgaaatgtcaatgtattttgtatgggaaaatcaaaactactgtaaagacctaagaaaagcatgtctccttttgtaacaaaccttgtgttattcatataattacattttggcatgaaaggaagggtaatagtttgtaaatagtttatggaactaacaagagattgcaagggaaatgtcaaggacatgacaaaggaattaatttaaacatctttaaaactgcattagtaacggccataatttttctagtgacagtcaaacaaataaatgttctaatttctgtgcagactacaaattgtgcatgatatgcccttgcttgtttatccacctgaaccatggaataatgatgctgaaggggaccccagtgctcatctagtgaccgaatccttatttgaccattgcaggaatcaagttcccccaaaccatgcatgtgaaagtaatgaaacatctaaaaatatatcctgcagcttgaacctctgcttactcataatagttcttacatccactccatgctcttgtctgtgttccaactccttcccctggtaatatgtttattaattgaaaaaatattacatacagtgcctgccctgtatgaaatactgaaacaggcactatggggtgcatggaacatagttcctgctgccatggagctcaccatttagatttggaagtaagacccacacagaagaaccaaggcataaaacaggaccgtatgtaaatcagtgtcaagggagctacaaactgctgtaaaatttcataggagggaaaggggattgggagatcacttccagctgagaaaagaatacaacaaaaatttttctattcacttgctttgagttttagggaaatcatgtagatttctggacttcagctttcttcctagtaaatgtttaataaaataacaacctatactccatgactggtttgaggtatcaccattctaaaatgcctgtgatcagagattttgaaattcaagacataatgcagttcaaagggtgctgctctttggcaagcaaagaacagttgtatctatcagtattgttaggactcttttcatctgcagggttttaatatttgtctgaattctagggggcaaatgcttaaaatgaaaatggtctcgtgcccttttattggcaaaaacaactttaaatgattaactctttgattgttagaagttttcacagactttggaataattcttactgacaggtagaccctcaaaatttggggtagatctcttttattttaagtagcattactatgaatgtaaatgtctagctttctaactttatttgaagaatagcaaattgttaaattaagtttgacctggatgcagtggctcatgcctgtaataccacactttgggaagccaagacaggaggatcgcttgatcccagaagttaagaccagccttggcaacacaacatgaccctgtctctataaagaaaacaaaaatgaaaaaaaaaaaaaaagttagaggtaggcatgaaaaattaacatgtagaaaataaattattattccactacatatagcaataactgaagaagtgaataaatgattattccactatatataacaataactgtgttcaaaacacagtccttgaacacacaggcactctctgccccagtgcctttgcacctgctattccagctggctgtcatgcttttccacaggctttcataggacctgctccagttttttccagtgcccccttgctgttacatttttgtgtcactgattacctcctggcgtcatatgtgtttattggttgcttgcatattgcttctctcccttcacctcactgggagcttcataagggacatgaataatataagtattactacagataatgcaagtaataggatactcatgagctccacgagtctttgcatgttttttgactgctataattctagcgcttagcacacaataggtactcaataaatatttgtgaatggataagtgaattaatgaattagatggctactactaggcctgatttgtagtcatgctcagtaaatactgactgcaaatttttttagtgcagaaaccagaagttattgaaagcagcacagaatgaggttgaaaaccaaaggttcttggtgggaggattttttttttcttaatatttaggatgacgcatgtcactgaaattcaccatggatcaagcttgggcacagtgcccgggatataagaaggagagcggtaaagatacttcaaaaaaaacaaaaagaaaagaaaagaaaggaaaatagcctctattggctgtttaaagtaaggagagttgacttaggtcaaaagaaaagggaaatgtcctggaaataaaagttaagtattataagatgccattaaagggagtttgtggaatctccttttctggagatgtttaaaaacaagatagatcatcatctcttagaagtgttgaagttcagtcctacccagaggcaggaagattaactggattacgcctgtgtggtcggtctctagagtcattggaagagcccttgaatgcagtaaatattccacattctcttggctgaaactattgtttcataactgttcatttgaaacttggttattataaaaccagagtgaatgtttgtttaagtaacaaaattgaatttggatctcgggttgatgatgtaagttgagtacatcatatatacctaaatcagttttaaaaacattaaaataaagtatatatagtgctgaaactattcagaacataacttagtctttttttttttttttttttggcaagagagagagaacattgcgtataacttactagtcttttataatgtaaaaaaatgcctgtttccctgcgagatcttaatgccattaagtacatcaataagtaattataaagtgactactataaacattgcaggcttcaaagatgaattcgatatggatcctgctttcagggaacttagtctacaagtggagatgaaacatatatacaggccgggcacagtggctcatgcctgtaatcccagcactttgggaagccaaggtgggaggattgcttgaacccaagagtttgataccagtctgggcaacatggcgaagtcccatctctacaaaaaacacaaaaattagttgggcatggtggcatgtgcctgtagtcccagctactcaggaggctgaggaggtaggatcaattgagctgattgaggctgcagtgagccatgatagtgccagtgcactccagtctgggcaacagagggagaccctgtctctgaatgaatgaatgaatgaatgaatgaatgaatgctgtctcacacacacagatcatatacatgataaatgaaaaataaaataattgagataggagccataaaaaaggactaaacagtgttgtaaggtttcagagaaagaaaagatgattcctttggatttaaccaagaatgcttctgggaggaaaaatgtatcgaactgggccttaaggggtatgacgtattttgaagggtggaaatgaaggagagaacaaggacagagatgaaattatacttagtaattctgaggtaaggacaagttccactggagcatgaggaatttggggttaataggctgggagggcctattgtggctagtctcaaatgccaggccaaagagcatgggttctgtatgctcagtgcttaagatctcttggaagtgattaagcattgaaggatcctgcccatgggaggtttgtaatttgctgtttggactgcaagagataaagggcaatagcagtgagcccaggaaggtagctgctgagtcacctgggctgcatttgctaagggatatgctgagaagtagtagttccaaggcatgttaataagtgttagtccaaaaagggtctcctcaccaaaatgaattggggaaataaaatgttaaacaatcaaataggcttctttcctggacttcatttctgaaaagtctctggaagactttttagagcctttaatattgagaatttcattgagaatctcaaataggataaaacgtgcaccacttccaacatgatttggtcttttttcatggagtagctcatgaaactctggttccttagaacacactttggggaacattgctctacacatttgataataacagctggaacacaagtggtggtaatgggcatgaaaaacagcagttagggccaggcatggtggctcacgcctgtaatctcagcactttgggaggctgaggcaggcagatcatttgaggtcaggagtttgagtccaccctggccaacatggtgagacctcgtctctactaaaaatacaaaaattagctgggcatagtggtgcgtgcctgtagtcccagctacttgggaggctgaggcaggagaattgcttgaacccaggaggcagaggctgcagtgagctgagatcatgccactgcactgcagcctgggtgacagagtgagactctgtctcaaaaaaaaaaaaaaaaggaaaagaaaaaacagcagtttgatgggagtccttacaggggaagcaccaagaagcaccagccattcccggtatatagtaggcattcagtagctatacagaaagttaattcatgtaaaagtgaattaatgatttcataccagtagatgttggtgtggatgcggtcaacagggaacacttttacattgctagtggaaatgtaaactagtacaaccactatggaaaacagtgtggagattccttaaagaactaaaagtagaactaccatctgatccaacaatcccactcctgggtatctatccagaggaaaataagtcattatacgaaaaagatacttgcacatgcatgtttatagtggcacagttcacaatcgcaaaatcgtggaaccaacccaaatgtccatcagtcaacaagtggataaaggaaccatgctgtgtgtgtgtgtgtgtgtgtgcgtgcgtgtgcgtgtgtgtgtgtgtggtggaatactacttagccataaaaaggaatgaattaacggcatttgcagcgacctgcatgagattggagactattgttctaaatgaagtaattcaggaatggaaaaccaaacgttgtatgtcctcactgatatgtgggagctaagctatgaggacagaaaggcataagaatgatacaggggagtttggggatttgaggggaagagtgggagaggggcgagggataaaagactacaaatatgatgcagtgtacactgctcaggtgatgggtgcaccaaaatctcacaaatcaccactaaagaactaactcatgtaaccaaataccacctgtaccccaataacttatagaaaaataaaaaaagataaaacatgaaattagccaggcatggtggcgagcacctgtagtcccagctacccaggaggctgaaggcaggagaattacttgagcccgggaggcagaggttgcggtgagccgagatcgcaccactgcactccagcctgggcaacaaagcgagactccaactcaaaaaaaattaaaatttaaaaaatatgaagagatacttttacatgtaaaagacatgccaaatactaaacatgtaaaattgctaaacatgtaaagttgcttcacatctttacttttcgaggaattgtatattaaaaatacagtaagaaccccccccaccaccaccaaaaaacaaaaacaaaaacaaaaacatgctttgctggagattgcctgcagagacagaaggggaaaggagtgcaggatgggaatatggagagttttgaacttcagtatgctacagatgatatcatggaaagctaggagaaggaactgctttatatgaaagttgagtattgagaagctgagggagatcgacctggaaggttccatggttgctgaaaccatggacttgcgagagaagatattgtttttgttttttgtgttttctcatcagatgtattgtggaaaaaaatatctcgttaaaatgtctggttatttgaattctagataaatagtaattttcatatacaacttattctaatacagaaagctaaccatatatttagtctaaaagaaatatcatagggccaggcgcgatggctcacacctataatcccagtacattttgggaggcagaagagagaggattacttgaggccaggagttcgagaccagcctgagcaatagggcaagacctcctgtctgcaacaattttttttttaattgctcgatatggtggcatgcactggtggtcctagctactcaggaggctgaagcaggaggatcccttgagcccaggagtttgaggcttcagtgagctgtgatagttcaactgcactccagcctggatgaccctgtcccccaaaaaagaggaaaataagaaattttatggttaacaaaagcaccaaacctatagtgatttttttcagtcagacagtagtggccatccttctcatcttcacctgtgatttattttagtctgatttactcataagaagttaattaatctttaagtttaatattttgttctttcattcaggtatttgcctttgattattgcttttggtccatggatgaatctaacactacaaaatacgctggtaagttttctccctctacacctgacagttgggcttctggcctcttcttccattgagtttattttctttaattcctctggagttttactttccctgtgtaattcacacctgttctttccaattataccacatgagttttgaagtcaataagatttggtttcagaatctgggtctgccacttacttgtaaaatccttgaacagatttttattaagcttcaaattgttcacctgacctccttgtggtattttatcctcattccatccaacacaaatgactgctgttttataatttatgaccataggctttcctaggagtcagtcacaattgctttagttccagagggaagcatttggtttggtggaggaagtttttggttcttttgcttctgattatgccccctttttcttagatatttcatctttttaaaaatttatttttcgtccgggcatggtggctcacatctgtaatcccagcactttgggaggccgaggtgggcggatcacttgaggtcaggagttcaagaccagcttgaataacatagcaaaaccccgtctctactaaacatacaaaacttattcaggtgtggtggtgggcgcctgtaatcccagctacttgggaggctgaggcgggagaatgccttgagcccaggaggcagaggttgcagtgagccgaggtcccaccacagcctaggtgaccgagtgagactctgtctcaaaaaaataaaaaaaaattatttttctaactggcaaatgaaagttgcatatatttatcatgtacagtgtgatgttttgaaatatgtatatattatggaatggctaaattgagctaattaacacatgctttacctcatgaacttatccttttttgtggtaagaacacttaaagtctactcagttagcaattttcaggaatacagtacgttgttattaactatagtcaccgtgttgtacaatagagctcgtgaactatttcttcctactgagtgttttctccttatttctacttataagagcatcagctgaatgacattctcagttagttaaaaacaaaaaaatgaagggaggatattggccttaaaagatttggaggtaaaagcacatgactagtttaaagaaaattaatgttttgtttattgataggtttttccttgccatataaagcaaacttgagaaattgtttgataacataattttttcaagagttaacaatcttggactaggagaattccttcagttgctcacactgggtaaattagcctttccaaatatcattcctacaacttgagcaatatattttattaaagtgagtaagtagttcataatgttggttgtaattaatttgtctttttatcagtcctttgggactttatgtaataagttcttcagagtctggaacagtcttgacttgttagcactctgtatttttgtgccgggtgtgtacttttagatttaaatcaacaacaaaagtaaaacatttcctacagatgcagagacaaatggggataaatgctatggttatacaaacccgtcattaaccgtgttcaatttatgttactcaagatgcagccatatatatcttcctgaactggagctcttctcatgcacttctcagatactttccaggactcctcatcacatgctagaaaaaatctatactctttggactacatttgaggtcctttattatataaccccattctaccttctccactgtctcttctgggactcctctcaccactcattcagtgcctcagcccagtgtctgttgttggttcctctcatataactcaggaagccagaaagtctcacaataattttttaagtattcatgactccccccccaacccactgtgtgtgtgcagcccatgaagcccttgagaaatccaaaaataagttagaaagcaaaagaaatgcataccaaataacattttgagataatatttaaactctaaattttatagattttaagtgttacataaaatccaaggagagataaaatctggaaaggcaccagattttaaagagaaagagaaaaggcaccagattttaaagagagaaaatctggaaaggcaccaattgtctgggaaggcaccagagagcagatggaacatagaggagataagtatttgagacaacacatacattaaatcgcctgattcagccattccacaagggatacatatatcagaacatcatgttgtataccataaatatatatgattattacttgtcaacatatgagttgtttagagtttagtcaaagggaagcctagaaggcatccagacaagaggaagtgacatgtgtcaaggagagcacatggattttgacgtgagacctgtgtttgaatttcaggacctctgccttggttctcttggacaatttacttaatttctctgagctacaatttgttttctatggaagaaagtaaaaatggcaatacctatgctatgtggttgctgtaagggttaaataggtcactttatgtgctgattaatggaaggttcccgtaaatgatattttcatttgacttttccgtaaaggaagatacagagccatggtggtaatgctggtctgagcagaaggtatatcttggcgggggggaacccagctgcaaagttaagattaaaaaagaaagaaagaaaaataagaagatgcatcttgttggggatgcgatgggagacctatttgtacatgttgaatgaggccagataataggaaattctaagaacttcagactaatatggtgaaaaataggggctattggagtgaggtggttaaaataatgcttaaggaagattgtttttctctttcttttccatatcttctggaatcacatcctccattattgcccacagagaacactctagccttctgcaatatatcactcatgtgcctggatgtgcaacaaactttttttttttcaaaccagaaatgacttcattacatacagatgataaaatttagttgtgaaactcaagatttctgtagctcttcattacagatagttcagatatattttaaaagatcaaaatgatttttaaacatactgatagcctaaaatttagtaaattttaggttgcatgatcacattgagtaccatgtcccagttagccctgaaattggcttctgccagctcatagagcactgtctacttaaaaaatttgggaggatattttcttgttcttcagatattcccattatcatacaaatactatgatgctccttctccttagcaaaaggtaaaattcatgcttactattctctcaagtttacatctattgtaaataatctgcctagtaaatacgttacgtgtagattagttgatggtttccatactaatttttctcttcattaaaaaataacaattccttcttaattgggaataaaaacattaagatagaagcattcattatctggtggaaaacaggggaagtggagaaggggaagcacatatttcctgaaaccgacctatttgtcaggctcgatgaataatggcatcattgatactgatcaggactctcaaagccgctctcaaaactggggggtagcagggagagagacagagaaagataagtgcatggattgagaaagcaaagagaagcaagggctcttaagttttgtgtggtgtgtcaaaatgttaaattctcaatcatgtcttgctatttattaaaagctataggaagagcctccacgctcccactttctgatttagaaacacgtaattctctagtgggtataatggcattgtagtgggttggttggagcagttgaagaatatgggctcttaagtcagacttggttcaaatcctggctctaacaccttctatctgtgtaaggccgggtgagttactgaatctcacgatccttctgtttcctcatatggtaaataaggatactaatagttctgatctcatagggttgatctgagggctaaataatgtattcatttaaagtgcttaatccagtaagtacctggcgacttagggaggaggaagcactgccttaatgtttatcgttgtctttattattgtctcattgtgacaggagtcagcactttggaaagaaaatgcaatgtactgagatttatgacaactggttttgccacaaactgctagaccttgggcaggataatttctgtgggtctctgttcttcatctgtgaaaggaggagatacagcctggaatgatctcagatcccctccagctctctgataaaacatgaatcagccattttatgttggccacacagctgttccagtggacttttcagaggcaaattaaaggcttatttgttaagccattcacattgcattgaatcatgctttgaggtattttacattttatttatttgtgtttttttttttttttttttttttttttttttgagagggagtctccctctgtcgcccagagtgcagtggcacgatctcggctcactgcaacctccgcctccttgggttcaagcgattctcctgcctcagcctcctgagtagctgggattacagacatatgccaccacacctggctaatttttgtattttttagtagagacagggtttcaccatgttggccaggctggccttgaactcctgacctcaagtgatcagcatcccaaagtgctgagattacaggcatgagcgactgtgcccagccaggaattattttacatttgaaatatattatctcttcctcctattagcttttggctaggtagttgtaataatgtttgtctggcagataattctgaagcaaaaattttttttttgcttcaaaaagaattttgaagcaaaaaccctgtgtaagggctaatgaaaaaaaaaaacagaaataacctgcagaattagatacctggagcatggcatttctacataaactcatatgttctcccgaacttcatatatacatgcagatatacacagatccacatttaagattataagttagtatattatagtcaatactgataaacttgaaagcagtctttgtaaatgtttaagtcactgctgattgcaattaaagcattcttgacaatgaatcaatacattttttaacatttctaaaatgtgccatgttagtagataacagtgacttccagtaactttggtttttattttcttcccagctctacagaaatcttcatatcaaaaataaaaaaaaagcagtctggtagtggcatatctggggtcagtgtggatgtgaacattccctggcctgagagattctaaactgttgactcagaaattatataacagttcttgccatatggcatgttgctcaaatgtgctgaagccatgtgttttcgagcattgttaatgccctgcaactcaggagaaaggttgtacatctgcctcttattctgctagcattgctttatactgtgaggggacagaagagcacctccaatctgtggactaatgcagtgggaagagcagccatgtttgattctgttcccatcatgggggattttatgtgctcagagctagaaatgatttctgcttcatattgcttaactaaatattaacttaactaaccagaatcgtaatgagacaaaacatttgtgcagcaaaatttacattctaaaagccaacagtagccaaaatagaaccaatttcttagctgagttctacaatattaatttgttctagcatattgtattggttcattattttactattcaggtggtctgtttgaatgaagtcttttttctagtagttaaaagcacaggctctggagtcacacttcttgtgctcaaattctgcctctgccacttcccaactgtgtggctgtaggcaataataacagcacctccttattataaatcttgtgggttgaaatgagattatgtatatgaagcactcagcaagtgccttgcacagaggaaacactcaataattgttagctattgggtttaaaccataaaagttttccctatagttatgagcaatgctagtagttgctacttgaacagtttgttaaagtagggattcattataaatgatgcatgccattttaaaaaacatttatgaaaaaatatgccaaatcctcccagatttttgtttttcttttatggtcttttataaattatctcactcatactcaatttgtcatttcttttggtgactcacctttatcaagttgttcctaagcattctatttagagttttcttagaatcagcaaccctcttttttgcatttgttaattaaattatgtaattacagagaagtacaactgacatagaacagtttaggagcaaatacaactgaccctttgtacaagcataactcagctggtgagagtccagagagtagcctcccagctggggtgatttagcatgcagggggcatttcatagatggaagagagaatgttgggtaatccagagaattggataagaaggtcagttaagaaaaatttttcttgtaaaggatgttaaaaaataaatgagctttgctaatcgtgttaaatttttttaagtgtatatatatgtgtgtgtgtaaatatatatatatatatatatatgctgcttttttgttctcccctttactcacctattttttatcctatcaaatcccattttcttcaatacctccctttctttgtccacatttgttccttagggtgtttgttggacccagaaacatcatttaacttgtgtttagaggggtgaataacaatagcaatagatagtacaaccctgagcattgaatcccaagcactgtgccgatccctctacatgcactaggtgataagattgtcaaagcacccagtcaggtagaaactattactgcccccattttacagataagaaaactgaggtttagcgaagccctgctccctatgagagcactgaaagcattggtaaatgtggatgttagttaatgacatgtatgctggtgaaaattttatggattctactccagcctatggtgctcctctcctctctcatcctgaagagtcattcaatatgactcctaaggaagtcatattgaagtgctctggcttagaacctagccaggaatactactaaagttaccctcactcctgtcagaagttctctaggatccttatatttggtttgggctttgttttaacctcgcctcaaatactataaatattgtgcagcccacaatccagaagagatgttgagttgggtctgcttctttgtcagagagagggggtgtaaaacaccatcaaataagatagaaatgaaggtttactttgtcagcagttattttatgggaaacaccctcctgtatgactccaacacacattctctgtaagacattcttcacaggtgagtggctttatattctttcttcattctcgagaccagtgcccagggcagtggttgcatgacctcctccttggtgaatcagccactgtgtccagcaacaaaaaaagaccatgctcatggccagccccagtgctgttgctgtggtggaaacatccatctggatgagtcagccgtgccatgctgcaagccagacttccagactaacactgatagcttttgaatgctacagtggaaaatgtgtccgtggtctattaccctcatggcctggtttcttgggatcttcttaccaggcacctcaatggtagacttttctgtagttgattaaaacttaaatctagcaataccaagtcaagccttacagcttcagtttctttatctgaactctgtagtttttggtcatttaacttaaaccaggtttgaaatcactacatatgagaatttttgaaagctgcacttccatacaccaaagatttttgagaaaggaatttatttaaacctcatccaagctgggcattcttcaccccttcaggtatgtgagaagaacctgtctggtcttgcgctgtccaggtgctctgatttggagctgggccacctgccaagtccagactcatcaaaatcgctgtgcctgtcagccctgtttagaagtgaaaaaacaccctcacaaatgagtaggcccaggaattccaagtcataaatagtgagcccagcctttatttatttttttttcctctctctctctactctgattccaaagagaagagatagggaaaggaaggaaaactgggggctcagtttaaactgatgaaattattgatcgtgttccaatattggatgcttttctatgtagttactttagaaaaacaagaaatactctgtgcatatgccaggtctgatctgtgcatcaccatgcttagtgttttattcagccatgggccataggtgtctgccttgtttaatgcagattttaaacaagatagggcttatatcctcccatttcattctctcactttctagaacacagcccactgtgactcttttatcctgtgcctcttcagtcatcagatgttgggtgtaggaatgatagctgcatttttccttccatccctggtttctttcttgctatagaaagagatttgccttggttacccatctcccagtacacacacatggtggctttgagcctattgctgctgttctaagtagggacagattatgcacaagtgtggacacccaagggtgttagcttttcaaagatctctgtcaggctgggtacaatgactataattccagcactttgtgaggccaaggtgggaggctcacttgaggctaggagctcaagatcagctcagacaacatagcaagatcttatctctactaaaaaataaaaataaaaaattagccataagtggtggcacacacctgtagtcctagctactcaggaggccgaaacaggaggattccttgaacctcgaggagttagaggctgtagtgagctataatcacaccactgcactctagcctggtggaagagcaagaccctatctctttcaaaaaagaaaaagattcatatcgtatgtgactcagggttgggtgactcaggtctgtgactttgcttgtagaaattccatacaggagctctctctgttgttctgacattgtgttatgggttactttgggcatgcctgtgttttaagacttgttcacatgattatagaaggtctaatcataaaccccagaggaaattggcattgtggtcatggttattaacaagtgaggtcaggcttgccctgtgaatttgctgcaccaggcatgtggagctaacatctgcagagtggccaccgcctttttggcatcggttctgctgaaaagtcacaggcctcttggatttgacaatgttatggctctgctcggattgtctgggatagaaacaaatactcatagatcctcctgcttcccacgggacttaacgaaccttcgtttatgggctggtatgctttcccctagacaaatagcacctcattctatttgagtgtaaactagtcggaaaacgtttagggtggagatattgcgtcttttatgggatccacccatgcactgtttgaattccctgattcccaccactcagcgtaaacagctccttttttcatgaactgaggttcaaaaagcagttggcaagtcgtcttttcctatgctgagaaaagggactgttgtgtttaaaaaatagaagtgaacaaagcaaaaacaaaacaaaacaaaaaaaacaaaaatccttcggtcttttggataaactagggtctcttcaagagaccatatgagggttcttgatatttcatattttctattgcagaatgaagtgtagccatcatctgtgtttcactgacagctgattgcaagagaggacagagactgtatcaacagtcatagtgcctttttaggctttggttgacaatttggccttttttatcgttctttttcctataccagtggtgccctgaaggtcaccaaaccgaagaattggttaagtataactccggccacgagttcacacagctgaaaaggcaccagaagggcagaataaggggaactctagaacctgtcccactcacagttttgctgatatagttttttatattgggtttttttgttccctgtacccttctcagtgttaaaaaaaaaaaaagaaagtatttttcttataatagacaatatggattagcataccctggccccagtaatgatactgttccttcatctcatcatgtccatgcacacacaaacacacaccccaccctttctgtcctccacccccttaaatgtgagagtcaccaccatcatatttggtcggtaatattttttaaatgggacctctgtgggagctagaaaaatagcgataattggttcctttcagaaatctttctaagaacaagtatcttttctttttaatgttttgttttaagagatggggtcttgctctgtcgttcaggctggagtgcagtggcacgatcatggctcactctagcctcaacctcctaggctcaaacaatcctccaccaccatgcctggctaattttgtttttttgtttgtttgtttgtttgtttgtttttgagacgcagtctcgctctgtcgcctgagctggagtgcagtggcgcgatttcggctcactgcgacatccacctcccgggttcacgccattctcctgcctcagcctcccgagtagctgggactacaggcacccgccaccatgcccagctaattttttatatttttagtagagatgggatttcaccatgttagccaggttggtctcaatctcctgacctcgtgattcacccaccttggcctcccaaagtgctgggattacaggtatgaaccaccatgcccggctcatacctggctaattttttattttttgtagagataggggtctcactattttgcctgggctggtcttgagctcctgccctcaagagatcctcccacctcagcctcccaaactgttgggattgcaggcatgagccaccacacctgacctttttccttttatctttgaaattggattatgccacaaaattgttgcaaaaatgaaggagccatctgaaggaaaaataactagataatttttctttgcagtaaaatgaattatagttgattaaagacttaagagatgataataatagataataactaaaatatattctagatttatactggccacgtactatggtaagtactttacctatattggtttattaaaccatcccagtagcccacttaggtagcaactattagtcttattttaccgataaactgggaaccttcccagtgtcacatagctggtaagaagtaaaactcaggtttgaaagtcaaattgtaaaaacagtggtggtgcacatctataatcccagttgtttgggaggctgatgcaggaggattacctgagcccagtcatttgaagctgccataagctgtgatcccgccaccacactccagcctggacacaaagcgagatcctgtctccaaaataactaaaataaataataacaaaaataaaactagaagaaaatatgggtgagttctatataatttgggggtgaaaaaggatttgtgaggcatagcacatatcataggcagaaatcatgaaggaaaagagaaaagatttgaatatgaaagaccaggagctttcgtatgaccaagaataaggtaagaccgataggcagatgacagactgggaaaaaatatttataacatataagatagaccagtggttaatatcctcaatatgtaatgaggattttaaaattaatgagaagaaaagcaatggctagcgcaaggacttaaatagtcaacttactaaagtgttaatacaaatgaacaataaatagaagaaaaattatccaaacaagaggcttttctttcctactgactcagtcagaactaagaagaatgatcacagggattgttgttgagagtgttgtaagtagagaccaatgcatttttagagaacttggagatttgattttttgaagttttgcctagtaaagtcaataggaaactgcacagaggtaaacatgtaagaataaacattgcagaaaaataaaaggaaataatctaaatatccatagtagggaactgattgcatcatacaatggaaagctgagctcctgttaaaaatgctaatgttgatgtatatttgtagagatgggaaaatgttcattatttcttgtcttaaaacagaatgcattgtctttgagacacaaagccatagtaataaaatgtattccagtctctctagactccaatcttgtgtaaatttgtaaaaatacatggagaatgaaaaattttttcagaaacgtagtataatcattttcaattttttatgttgtttttctcagattttttcttttccaattatgaataaaactttactaaatatgataaatttgaattctattttatctgccaaaaataactgtaactaaaagaagttgactatatttgaaatcacatgtatatatttagtggaaatcagagagactagtttttatttttttgtcacatatattttgttgtaatgtccaggaggatacggtgggtattagtaaaaaagtgatttgtaatttttatcaaaattacctaattagtacctgcatagtgtgttgacgcatttattcataccccattggcttatttaacaaaggcctactgtagtcttatgggattcattagaatttcaaaaacagtcatactttgaccaaagtgtaaactaatacaattaaacatttatttttaagttcaaagaataatttttttttttttttgagacagagtctcactctgtcacccaggctggagtacaacagtcttctgataacttattgtcactgatgagggaagaggctcccaattaaaaatacatttttctgaaaacagcagtatcaacacaggaataattcagtgaatacagatgcctattgtgtgccaggcattctactaagatgcagcaattactgttttcacaatctggcagtaaaggtgaacatgaaaaaaaaattgtgccagccaggcacagtggctcacacgtaatcccagcactttgggaggccaaggcaggcagatcacctagggtcaggagttcgagaccagcctggccaacatggtgaaaccctgtctctactaaaaatacaaaaagtagctggacttggtggtgggcccctataatcccagctacttaggaggctgaggcaggagaatcgcttgaacccagatggcagaggttgcagtgagctgagattgtaccactgcactccagcctgggcgacagaacaagactccatctcagaaggaaagaaaaaaaaattgtgcagtgtgatgagttctgacagtctgtaaaaattatcctggagaccagaggtgagagcaactgattgccagtgtcatgcagcatgaattactgatgatgaatggaatcagccttgacagtagggagtcactataagctgacccaaaccctgccattcactgataatgagatcttgggcaagtgacttaaccatttcaagccccagtcagcttatcagtcataattcatacctactctacctgggtattgtgaggattcaataatatagaacatgtaatcccagcactttgggaggccaaggcgggtggatcacgaggtcaggagttcgagaccagcctggccaatatggtgaaacctcgtctctactaaagatagaaaaaattggccgggcttggtgttgcatacctgtaatcccagctactcaggaggcggaggcaggagaatcacttgaacacgagaggtggaggttgcagtgagccgagatcgcaccattgcactccaccctgggtgacagggcaagactcgtctcaaaaaaaaaaaaaaaatatatatatatatatataaaatacattgccagcaggacagttgataaaaattatctttgcttttccttagtagcataaataataaaagaatacaagtttaataggttaaatcatgtcctgtttagtatttgcaacaatttggtcatacactaaactaaaatttactcttgtttttttggtttttttttttacattttttgtagaaacagagtctcactttgttggccaggctggtcttgaactcctctcctcaagccaccctcccacctcggcctcccagagtgctgagattacaggtgtgagccaccatgcttggcctactcttgtatttttatatgctggggagttctttgatcatttcatttatttttcttgcaattttagtatacacatcctggtggtttgtttcatttacatcataaacctacttcatacaactatatagcagtcatccttgtttttccaactaacaatctttagtttaaaaggccattcctaccaaggaaaaagacacattgtgatttactcttgaaagaacctaggaaaataattcctcctaattccagcgtattcagcatcaggagcagaaaccagaagtaccacattttactacctgatacaggaatagatatactaggtattaactttaggctctcagaagccataataaaatctctttgaccacagtacttctctgcaattgagtcctttcatcaactcaagctgttgggctttttttcaagttactaaatatgaattgaaatcatgaattatggtcaggatgcttgacttagccaactcttgaagtctcttgtccccaccctcaccccactcccttcctgggggctggttaaccagtgtggaagatcaaacaggattgctccaatcagctgcttgtgccaagaatgtattgcttttagaatgccttcaaatggcacttaggtctggctgaggaccacaagcaatcctaataagcctgggcacaggctggatttaattctgggtcttctctgatataggccttggctccagatttaaggcctaccttttagcaaggggcttgggaacatacgtggaataaggaaggtcctttgagaaaacatatgagaaataaatattaatgtgtatgaaagatcatgcaccagagtggtcaggtattttcttcgtgagcacaagactatcatacttgactataacataaaagcaatttgtgaagcagataataattttgattataccttattcttctctgaatatacacgtatttgcatacagatcttaaggtactcttcacaacagacctgggtgtttagaaaagtttcttctgattacacccattttaaaaaatccacatattccaccaacttgtttggtggaagttaccaaacatctatgctagatggtagaagttagcaatagagaaataaagttacataaatttggtatattttttccaatccattttttacactttagcatttgtagatctctctctctcacacacacacacacacatgcgtgcatgcacacacacacacacacacacacacacacacataactatttgacataaggttttacattatatgcacagttctgaacatggcttttttttcacttaatgttttttaatttgagcattatttacacatagatgtgggtgttgggggtttattgtttttaaaaatgttatgtagtatattccatcatataaaacagtcacactttacttactttcatacttacgggcatttaacttgattcccatttgcagtattatgaataacactgccatgaacatccttcacagggtcctttttgggaatgtgtttctagagtagatgcttcacagtgggtcaggcagtgtaggcatattcccttttatagatgctgtcaagttttccttcagaatgtctgtatgcgtttattctcccaccatatgcagcttatgaaaatacctatttcctcaatgcagcaatatttgatgttgtcagaattttattttttgccagcctaatggttgcaaattgtatggtctgtttttacactgttgtaaagaactacatgaggcaggctaatttgtaaagaaaggaggtttaattgactcacagttccgcatgactggggaggcctcgggaaacttagaatcatggtggaaggtgaaggggaaggaaggcacgtcttacatggcagcgagagagagagaaaagaactcaaaggaagccacacacttttaaaccatcagatcttgtaagaactcactatcatgagaacagcataggggaaactgcccccatgatccaatcgtctcccaacaggtccctcccttgacacgtggggattacaattcaagatgagatttgggtggggacacagaactaaaccatatcacaaatactatctcgttttgtgttgaaacacttttaagagtctcatcctgcagtcatcatatatcatagtataataagagactcctaaaatcagatctaaatttccataaaagaaaaacataaaaccaaaagctcatgttgtgttacattattttcaaatgtaaaaggaactatcatgtaagataaaaatgttaaattgactcattctttcaacatttattaagcattttgtactaggctctaggattatgaagataagcaggttatagttttgggcatcagggagctctcatgccagtggaggaaacaggtacttaaactagtagtttctgcaaatgctgtaatagtgaatgttctaaggactataagaagacaggaaggagaacataagtctaattgtcttagtgatacagaatgaatattagaaaatcaccaaattcaaagggtagcaaatgctgtccttttatgtgtttaaaacagattgtcactcctttactcttcagccccgctctgccatagtatagtacatgacacaatgcccccaagagctgcagtgtgatacagagattcacaaaagagaacttgtcccccactcccgctgtggggacacaggtgacgggtgcctgtgaatctacaaacagcagctgaagttgtcaatccatcctcagcaactaacggtttttagcacttggcatgtacaaaacaccaagctaggtgctgagggagataccaaggtgtgtataacatggtcttgttcagtggcagttcagaatctagctggggagataaggcaattcatgtttaatgacattgtagatattagtcataagaaaaaacaaccaaatttgaatgctgcttccatatggcccactcacaatggaaagaaaactttaatatctagagaagtgtcttagagggaaacagtgtatccaggtactgagctgtagtttagaagtgtggatgaaattgcatatatcaagctcttaatacacagccctgtacttagtgggcactcggtactacacttttaacatttttttgaattgacataatattgttactaacacaaatatgtcaagaaaaattattctttttattagtttttaatatttgtcttgttttttaggtcaagaagtggttttcaagtgccttggggaaggaattcttgaaaaagcctttcaggggtataatgcgtgtatttttgcatatggacagacaggtaagaagttgcttttatagaccagatgtgggggatcatgcctataatcccaggacttggtgaggctggggtgggaggatctcctgagcccaggagtttgagaccagcctgggcaacatagtaagacccgtctttataaaaactaaaaacattagcccagcgtggtggcacacctgtagtcccagcttcttgggagactgaggtgggaggatggcttgagcccaggagtttgagactgtagtgagccatgatcacaccactgcactccagcctgagcaacagggtttgaggctaagttggccactcttctgctatgttaccatggccagtatatggggaaaccttgtatggttgaagcattgcattttgctccctcctctacctgttcttctttttgcttgctgttctccaggttcgggaaaatccttttccatgatgggccatgctgagcagctgggccttattccaaggctctgctgtgctttatttaaaaggatctctttggagcaaaatgagtcacagacctttaaagttgaagtgtcctatatggaaatttataatgagaaagttcgggatcttttagaccccaaagggtaagttagtggtcaagattaagtgtgttaatagggggagataattttaaatgattctaaagttaaaattggaagtgaatatacgtatttaagctcttggtgactacactggttttcattcatttacagaaaaatcatcagcttctcaaagccttttggtatacccagtgtttatcctacattaatgtataaagttgcctatgtatgccctttgaaaagatgtttttactattggtatttttttttgccaccatgaactattcacaaaaattgagttaggaataacacattagttcttccatttacattggaaagtggcactaatgtgttaagggtaaaagggttgaaggattgaaacatcccagccaaggcaagcaatgcccttccctggctgtgcattggaatcatgtggggaacgttttaagcatccacttgcctgatgtccacccatagagactgtattcagtagacccagggtgaaacccagggatctatattttttttaactaggtgatttaaaaatatatttatctgattcatagaggaaggggggccatttactttttctcaattaaaaaatttggggccgggtacagtgactcatacctgtaatcccagcactttgggaggccaaggtgagcagatcatctgaggtcaggagttcgagaccagcctgaccaacatgacaaaaccccatctctactaaaaatacaaaaattacccaggtgtggcgatgggcatctgtaatcccagcttcttgagaggctgcaggagaatcacttgaacccaggaggcagaggttgcagtgagttgagatcacgccactgcactccagcctggggaacagagggagactccagctcaaaaaaaaaaaaaaaaaaaaaaaaaaattatactgatttaaaactagtatctatttatggaaaatttgaaaaataggtaaggtgtaagaagaaataaaaatgacctataatctcaccattcaaaaataatcactaaggccaggtgtagtggctcatgcctgtaattccaacattttgggaggccaaggtgggtggatcacttgaggtcaggagttcgagaccagcctggtcaacatggtgaaacaccgtctctactaaaatagaaaaattagctgggcgtggtgctgggcacctgtaatcccagctactcaggtggctgaggcaggagaattgcttgaacccaggagacagaggttgcagtgagccaagatcatgccaccacattccagcctgggcagtagagtgagactgcatctcaataataataaccactgttacactttggtgcattttgaccaaaattatgagtgacaaggaagtgacccaatcaaagaaaatgtttatatttactcttaagaagctgttaactatttaatgcatacaaaataacatttataacacctgtaaggcataaagagtaataaaaacaactgcctacctacattggcttaataaatggaacatgacttagtcaaaagtactctagctaaaattaaataaataaataaataaataaatggaacatgaccaataattgtgaagctcactatacgttccccttggatccattttctacccctccccaaggtaactactattgtgaattttgtgtttagcattctcttcctcttctttagcatttacaaataattttgcataatttttaactttgtatgacatcataatatatgtgttctttggtgatttgttccccccaccgtgattcatttattcttatatatgaagtgctaatacatttttactgttgtcttagcatttcattgcatggttacatcaataattcatcactttctctgtcttttgtgtggttcctgcttttatcaatagagtgctgctctgaaagcattgttatacaggtttcctgctgtataggtaggtgcaggagtttctaggtaacacatctaggggtggaattgtaagtcacaaaatactgaatctccaattttatttaattgcgcaaactgttatccaaagtggttgtaccaatttccacccccaccagcagtgtacaagaatttcagatactggacaccatcacaggcacttggtataatgctaggtttgctttttcttgctgctgaatagcattatagaatctctggcaagcagagtaagctgtgtactggatcgtgtgcatctaagtagctcactgtcacattgaattcttcgtctttaaaataaaggtggtaaagcctactttgtagggatgttatgaaatgaaacggcataactgaaaagtgcttcagggaacaatgccaggactttgggatgcattcagtgatgcttcttagctcctttttcccatatattggtgatgctaagcaatgactcttaatttgaaagatgattaatatgtgatgccctgaaaaagatggtgtgcacaatatggtcagtatatacatagctttgcttttaatctccattgtcttttgataaactgttgaaatgggttccaaaccaggtttatcatttaaaaattcaaaagagctttaaaattttcattagcagaaccaattctaaatatagtacaaacgtcagtaattataaacaaactctgtactataatctcactttctgtataaaatagtgtaagcatagaagtagcataaaccaatgcagacttgaagtagagtttaaatgttttaatactgtctactagtaattcaaaaattttgactgggcggtggtggctcacatctgcaatcccagcattttgggaggctgaggctggaggattgcttgagcctagaaattcaggaccagcttgggcagaatagtgaagccacatctctacaaaaaatataaaaactagccaggcatagtggcatgggcctgtagtcccagctgcgtgggtgactgaggtaggagaatcacctgggcgggaggttgaggctatagtaagccggggtcatgctactgcactctagcctgggcgacagagtgagaccctgtctcaaaaaataaataccattttaagacattatctgctgagaatatgcttatttatgaaatagccgaaaggttaatttgatctggcatgttttttggttccctttttcccccaatcctccccaaagtataactgacagcctaacccaggaaggtttgtgactagagatagaatgtttaaaatagtaacatactttaaatagaaatcagagcataaaacacatttctcatgttaaacattgttttgctaatccaaataaagtagcttttagatttgttggggggaggagtcatttaaaaattcttttgaaattgttatcttagttactgtgtacttaaagagaaagaaaagcttccagctttggtgtgattcatttattcctttttcctccctcccgcaggagtagacagtctcttaaagttcgagaacataaagttttgggaccatatgtagatggtttatctcaactagctgtcactagttttgaggtaagtcattttttttaaaatgtgattaaaagctgactataaatcaaagtatgtaagtgatactgagtatattttatgtggatgctttatagcagaatgatactactcagggcctcagaaacccagtatcagcacaccgcaaacagagaggaaaagggcttttaatcacactcttcaagctgctttgttgtgaaggttttacagtatggccgggaggcccagtgttttcaggttgctgcatattttcactaatactactctgttaaaactgttctcccaatgatgccagtgacatccttctagacatgtggtattctaaacagtatttggcagttagtacagccctttctttttggcagggtctcctgccttggtttctgtcacttctggctctcctgtttttctgaatcactcctcttgccattgaccggcctgttttactttatttactctttgacttatatgccttgttaagatctgactcaagattctgcttctatttctatagtgattgctttggaaatctcataacacaaactgctatctctgttgctaaaggatgtgaatgaatgagtgaatgcacagagaaacaagcaaatccctgcacttactttgtgctgtttgtgggatgtggctggcccattatcaccccagacttagtatggctaaaactaatctgtgcagtgattctctccagccatttaaatcaaggtatatatagaattgctctaatcggaaatagagcacagtgatcattttaaaaaggtttcgattctgaaatgaatggatacttttttggtctaaaggtgctaactcagctccttcactgaggtccctggttcttagctcagtgtggttgaggtaagtgttgatgttatcctgtcacttactagtaggagccagggtgctctatttgcatcccagctctacctcttactggatttggggaaagttgcttgacctccacgaacttcagcatccttgtatgtaaaagcaagaaaataaagttcatttagcaaatatttcataagatcccataggctctaggcattctaggagcaagtgtacaaagtggaataaggaaaaaaccctgccatcagggagccacagtattggaggagggaggcagacaggcaggcatcagcgggttggtaagcacaggagagtaagagttaaatcaagtcactgctattattgattatcggagtgctcaataaatattagctatcccaggaacccaaaaaggagaaaatagggactcaactgagaaagaagacaattgggaaatggaaagaattagggaaacatttcatacattacaaagtcttgagtgaggtggaagctcaaaccatgctcaatggaggagcggcagggaggtttctatggaagggtggtgacaaaggcatcagaggaatcataattaatacatatacctggtgtgcaggactacattcttgtgtttttgcttatggtcttttccttatgctttgcccctaggatattgagtcattgatgtctgagggaaataagtctcgaacggtagctgctaccaacatgaacgaagaaagcagccgctcccatgctgtgttcaacatcataatcacacagacactttatgacctgcagtctggggtaagggattaggcagaacctttttggagtgggggtggaagaactgaaagtgtccatataggtaaagtctttcatggttgggttcagtggctgagaattgtatgttggctcttctgcttactaggtgagctactttgcttatcatttaatttgttaggtctttctttatatttgactttttaaaaaattggattttggcctggtgcagtggctcctgcctgtaattccagcattttgggagtctgaggcgggaggattgcttgagggcagaagttcatgaccatcttgtacaatatagcaacacccagactctacaaaaacaaaaaagaaaaataattgtatttcttgtgcaaagtccctaacaagtgtgatgacatcaccatacagcttttaatatatatcctttcatgctgaaattcccatggaaacatgtcagcttcatagccattgagggatattaaagaggacaccacaacctttagcctaaaccttttttcaaaggaagaaggatttgacttgaatgtgcagaaatcctcatgtcctcatatctcctcataggcattttaaatctccagctttctgactgtattccagaaagctgggtgtacttgctacccagctgcaaaacaaaatgctacatttctacgcctatttaaatgttaactatgaaattaattgctggttcaaataactcttctgaccgtttaaaaacttaagaaatttgccatatgagagtgggatggattgctcaattatagtgctaacatatatgtagatatccatgtggtttttattgataagtttttcttctctctctcgtttcctataactagaattccggggagaaagtcagtaaggtcagcttggtagacctggcgggtagcgaaagagtatctaaaacaggagctgcaggagagcgactgaaagaaggcagcaacattaacaagtaaggtggctggtcccagaacagcctgggtgatttccttctggaggggatttgttgcattatgagggtcagatggttctgatgtacaggttgtttaaagtctgtatagctttagtaaactgggctgaagaaaaacaacaacaacctgtgtctgttaagatgtatgaggtttttggccaggcacggtggctcatgcctgtaatcccagtactttgggaagccaaggcgggcagatcacctgaggtcaggagtttgagaccagcctggccaacatggcaaaaccccatctctactaaaaaggcacggtcacgcacaccggtaaccccagctacttgggagactaatgcaggagaatcgcttgaatttgggaggtggaggttgcagtgaatcaagattgcaccactacactccagcttgggcaacagagtgagactatctcaaaggaaaaaaaaggatgtataaggattttgtttaggtacggtggctcacaactataattccagcattttggaaggccaaggtgagtggatcacttgaggcaaggagttcaagactagcctgggcaacgtgacaaaaccccttctctacctggtctctaccccgtttgtacccatctctaccccctctctactaaaacacaaaaattagctgggcatggtggcacacgtctgtaatcccagctactcaggaggccaaggggtgagaattacttgaatctgggaggtaaagcttgcagtgagccgagattgctcccctgtactccagcctaggcaacagagcgagactctgtctcaaaaaaaaaaaaaaaaaaaaaaaaagatgtacgagttttaattaaataaaactgcatggtgcagcttgctcaaaaatggcacaaataccatattctgacatatgtggaagctaaaaaagttgatctcatggaagtagaaagtagaatagtggttactaggggctggaaaggggaggccagggggaataacgagaggttggttaatggatacaaaattacagctaaattggaggaataagttctagttttctgtagcactgtagggtgactgtaattgacagtatgttgtatattttcaaatagctaggaaagtggattttcagtgttcccaacacaaaaaaatgataagtgtttgaggtgatggatatgctaattaccctaaattgatcattatacattgtatacatgtatcaaaatatcacactttaccccataaatatgcacaattgtgtgtcaactaaaaataaaagcaagccaggcacggtggctcacgcctgtaatcctagcactttgggaggctgaggtgggtggatcacctgaggtcaggaatttgagaccagcctggataatatgatgaaacccttctgtactaaaaatgcaaaaaattagccaggcatggtggcaggcgcctgtaatcccagctactcgggaggctgaggcagaagaatctcttgaacccgggagacagaggttgcggtgagccgagatcgcgccactgtactccagcctgggcaacaagagtgaaactccatctcaaaaaaataataataataatagtacctacttcaccgatttgttagggataaaatgaccataatgtgcttagaaaaatgcctagcacttagtatgcagtgaataaaaattaactgttatagctgttgttttttataatcaggataaccattatcatgattccaagttcaacagaaagtagtttagtgtgtacttgtaatctttttctgttgagctgtaataacttagggtttcgtttaggacagaatgtgacaagaggaaatgtattcaggaacatgtttgcacagcttgcatttaagatgatgttaacacattattattttcatatacaaaagtttaaaaattagaagtaaaatagtggcccctctatcagatggacacagccgtactcacagggaaagaccactactataggaagttaatcatccagtcattctgtctcctgctctgataacaaaggattttgctgtatttcctgacaaggcattgcaagattccagactggcactgcagccctgcatgccaaaatgagttcagaaaccaggatggggaggcagaaatgggagtgtgaaggagcaggtttcaaagaaaagattgccacgcctcgtggagattcatttgcaagtgctgggccatgcctgccggtggggcttgtgggatcacactagaaagtctgtagacttgttggaatttagagtgtgtgtgtgtgtatgactggcgtagatgtggaatgaccactaactttattgagctcttgctaatgccaggcactattctgaatgctccatatgcaatgtcacatcagcatcaaggcatgggtccgttatccccattttacagatgagaaaaccaagacagagcaagtttaatgatgtctcccaggtcaccaagttctaagtgtggattttggaaatggttgccgtcaattggtctccgagcccaggctcagccactgtggctacacttgtggggatggctgtgcattctgtttgccaggcagcatctagatgatacttttgtcccagagtaaatgtaaatagtgcccccttaattttggatgtgagtttatgtagtgtcccttactggattaccccaaggcttggtgattacgtgatttagatcatttagtaactggctcttttttcataatgactggttgaattgaatggaattctctcaacatcttacctcttttcttccttccctttttttttttttttttttttaaagaaatggggtctcgctatgttgaccagactgctcttaaactcttggcctcaagcaattttcccatcttggcctcccaaagtgctagggttataggtgtgagccactgcttctggcctcgtcttatttacatactgtctctttcacaaatggatgtgtgtattccttactagtttatgagatatgatcttcctttttaagagttctttatacttttcagagcattttcatacactctgagagtctcataacatgtatttttatctctttttaaagatgaggaaaggactgatgcttagagacgttgaataacataaataaaatcccagcaaacatttagtatgccttggccgggtgcagtggctcacccctgtagtcccagcattttgggaggctgaggcaggtggctcgcttgaagtcaggagtttaagaccaagctaaccaacatggtgaaaccctgtctttactaaaaatacaaaaatcagcccggcatggtagtgggcgcctgtaatcccagctactcaggaggctgtctcagaaaaaaaaaaaaaaaaaaaaaaaaggttgagttccaaaactaaagaaatctctgacatgttcttaagctttctctcgtcctcccacttaacgtttctttggatggagcattaataatcctcttaagcaggcctgtcagggacttcacacaaacgtcagtgtctgcttaatgggctgtggatttaggaacttcatgtctcctgaagctcttaagacctttaagcacatgttactcctttcattaaagaattaagacactgcgtggcctactgccagggagtgttcagagcttaggaggtataggtcatctgtggaccatcttcacaggggaatacatttgaaaagccaatctgctgctccacctgtctagtgaaggtggaatgaggaagccttttccttgtaattgcagtctggctgcttcagctttgctgagaacacatttggatcatagagcactctctaatacccccagacactgaaaatggttccattttattcagtaatggctagtcactaaatgcaaacaatgtttatctaatgggtatcgttcccagtctcattcctatttcaattcctgtggttaataagctaacatcttatcaataagctaacatctccaaaagtgggttctattgaacacttgttctatagaaattcatatatgttacttctgggattgtatcagtataatttgttataatagagtaacttgtaagcatggtatttctagtatttcatgtgacttggtgatatggtatggctgtgtcccaccaaaatctcatcttgaattgtagcttccataattaccacgtgttgtgggagggactcaatggaagttaattgaatcatgggagcggtttccctcatgctgttctcatggtcgtgaataagtctcacgagatccgatggttttataaggggaaatcccttttccttggttcccattctctctcttgcctgccaccgatgtgccttttgccttctgtcatgattgtgaggcctccccagccacgtggaactgtgagtccattaaacctctttttctttaaaaattacccagtcttgggtgtgtctttatcagcagcatgaaaatggactaatacactcagtcttcctttttttcttcttgagtactttccatgattctggttcatttagagtcccactctaaagaggtatttcctgaataacaaaacatgaatttgtattgagggagaaaaataaaatggcttacttctgtccattactcaagggtgggtgtccttcttaatttatgacttgtacattacggagtccatacatgtgaattaaaaacctggatagacatctttgcatttaatgtgagagacccatcaaggacagcaaaactctgctccttgggacacagtagccacatcgttggaagaatttgatagggttacccaaggtttcctaaagcatttttgtctaacattagttcctcaaatggctttgagaagaaacaaatccttggacaagttattttgagaaagaataattataaaacctttctttggagattcacagtgctaaaagctcggagacgtcctgcagtaataaatcctgtaaaactttggcttgttgttccctaaacttacttgatgacagaattctaggttcaacatatgttaagatccctagaacaataaagtatacagtaacattttaaagtatacactaacattttcagaaatgtcagtatgtactctattgttctaccacaacggttgatgaacattgagtttaatgattggcattaaccactggaaaacaatttgaaaggaaatgaggctgatactgtagctattaccattttctttgctctcctgtcatgtgatggtactgtcctttactcataatttgccatccatattcttttccatttctgctttactgttaagagtgaggacttattggggagaacactaaactcaaatccacttatttcatcaatctttcaactaattatttcttttctttctttctttctttttttttttttttgagatggagtctcactctgtcacccaggctggagtacagtggcacgatctcggctcactgcgacctccatctcctgggttcaagtgattctcctgcctcagcctcccgagtagctgggattataggcgtgcgccaccacgctcagttaatttttgtatttttagtagtggaagggtttcaccatgttggccaggctggtctcaaactcctgacctcaggtgatgtgcccccctcggcctccaaaagtggtggattacaggcgtgagccactgtgcccagcctcaactaattatttcaaagccagggattgcattctgctctaagcaacagaaaccagctacactgacaatgacgtgagttaatttttctcatttaacaggaagtccagaggctggtacagcacctcagaaatgcacacagctctactaactttaatgtgtgttcatgtcatcttcatgatctcaggatagctctatcattccaaacatcgtatccatatctgtggtacaaactggaagaaggaaaaaggaggaagggcaaaaaaccacaggcttctgtcagctgaatttgtaccttcttttatcagaagaacaacagttttcttggaagccccacccagtaatgtttacctacatctccttggccagaactgtgtttaatggctacccgaagctgcagagaggactttggaaaatagagtttttagcccagcacattgcttccaggaaaaccagtgttctgttagcaagtagcactcgatgtatcccaaaaccatcattgaattagtcctttttaaacagaggtccatgttttggtcttcactgaatctagattcagattaacgctgcagatatttactgagtgctttcagtcataaaccaagcacagtaattgcatggaggaatgtgtatggcaaattacaccgtctgccttcaaggtaatcacaatctaaatagaaaagcagagaaatagctacacaaataactccaataaagtttaataagtattatatatatgatcttagaactgattattggactaataagtaaaataatatttgaaatccatcctatgcaatacagataatatgtacatcatatccactcctaaggaaagaaatctaatggtcagagtttcaggggaaacggtgcaggttaggtgaaggtgcagaaaagaaaaaaaaaaaagttggattataactcggttttttctcactgattatatttattggagtggcttttattttgcttttgaccctcccaactttcttttactttttttatccttagttcttcattatgattgatagatttttttaaaaaaaattctatcttaaaacatgactgtccttttataaatgtcatctcctagcttaagacttacttcctctccagttaggccctcccacccctgcctaagaacttatggtgagagatttaaagattaagagcctccttactatatccaactttaggagctgtgctttagtagaatcagaaagattcctggaataacttattttgccactaacattggcaaacagctgttcccttgttctggattcctgtgaggccaacaggctgcccgctggcctccagcttgagaagacagtattagcaggatcaatacttagtggtttttttatatttttaagttccctgggaataaaataattcataaaaatatgtaagcctggccaggctcagtggctcatgcctgtaatcccaacactttgggaggctgaggtgggaggatcacttgagcccaggtgttcgagaccaacctgggcaacatagccagaccccatctctacaaaaaaatttaaaaattagccaggtgtagtggtgcacacctgtggtctcagctacttgagggggctgaggtgagaggatcacttgatcctgggagatcaaggctgcagtgagccaggattgtaccactgctctccagcctgggcgacagagcaagaccctatctcaaagaaaaaaaataatatatgtataagtgtatacacacacacacacacacacacacacacacacacgtatgtgtatatacacatacatacatgtacttacatgtatgtgtgtgtgtgtatgtagacacacaaacacacagacatataagcctgtgattcgcctttcagacgttgaactttctaacaggttttgggattccagaagcccctgcatcattgcttctgagtggaacatagacaaaaaggatagcatgggctcctcatccctgggtgacctgattgtctctcacttgccattgagtcccactcaccctgcagttattttcattctgttccaaggggatggtaatagatttagatagagttcttgttttgaatgtgtggatactattagataaaaggggcggcttctactaatgatacacttctgtaactggatgagttacagagcaaaatatacatgggaattggagttatataacacttccatacagctccacccctctgctgctgctgcttacatgctatactgatgtaggggagaaaaaatatttttcgtctgtttgccctgtaaattagactggccaaagacagattaacaagagaaaagcaactagcattttattagcatatgcatcttgcttatgcatgggagcacccagagattaataacccaaagtggtaggtataacttgggcatacgactgggcatggtggctcacacctgaaatcccagcactttgggaggccaaggcaggaggatcccttgagtccagtagttcaagaccagcctgggcaacaaagtgaggccccttctctacaaaacattagctgagtgtggtggcatgcacctgtagttccagctactcaggagaatgagataagaggatcgcttgagcctgggaggttgaggctgcagcgagccatgattgtgccagtgcctgggcaacaaagtgagaccctgtctttgaaaaaaaaaaaaaaaaaggaaaaggggttttgggcttctggatgcgggaggcaggttatgggaaggtgaccaggaaaagtatggtgaataagagttgtctagagaagtttgtgacacagaagtttctccacctttaagagttgttaacagtacttcccttcttggtgctagagagggagacacctctacaaatggaaatgtcctttacaaaaggaaaattgatgccatgtttttagagcttttcctgagtctgctggttctcagtggcctctagcttaaaataatccatattctggcatccttcagtcagcttgcagacaagacatatgatggacattgatgacactgtatctttccttttttctctcaaagcgctatttggattttatgtttctacatttaggagtactagaaactttctgtgtttcccccttacactgtcaaagtagaaattataagtagttgccacaaagtagaggaaagtcttctctcggtgatggataaatccatgtcatctccaaaatgtattttcatgtgaaaggtcactgtcaaccataaagttactaatattgacttttaagtcactgaactctttagagcttgtgtgaattaaaataatatgtgccacacatagatagtaaaatatctgggatagttcaaagaattgtttccaatcaaaaatatcaatagttgcaaaatgtgaaaaaaatgccctgtattctatattaaagcagaaatgtgtttttaccttttattgaactcctacttgcctctattatcacatacagtatttttttcataaaattgttacctttggaggagtgattggacatatttaatttttttgaacagctgtattaagtaactcacatacaatataattcaccattgtaaagtgttcaattcagtagcattaatatattcagagttgtaccgccatcactacagtctcattttaaaacattttcatcatacccaaaagaaaccttgtatccaaatcattccctattacccccacccacagccctagtcaaccactgcctccatctctatagatttgcctattctagatatttcatataaatggaatcatacagtatatggctgtgttcgattgctattgctactgtaacagattaccacaaactgagtagcttaaaacaacagaaatttatttctcacaattctgcaggcgagaaatctgaaatcaaggggtcagcagggtttgttccctcttagcaggtcagagggagaatctgttccatgcctctccccttgtttctgtagggccatcaatcctcggcgttccctgtcttgtagatgcatcactccagtctctgcctgcatcttcacgtggccgtctcccctgggtgtctttatatgaccttcttataaggacatcactcattagattagggccctccctaatccagtatgatctcatcttaactgattacatctgcaaggaccctttttccaaatagggtcacattctgagggtctggcggacatgaatactgttcaacccaggacaatggccttttgtgtttggcttctttcacgtaaaataatttgccagggttcatccgtgttgtagttgttgtgatacatgtatctgaacttattcccttttatggccaaatgatattccactgtgtgtatataccagattttattcatcacttcatcatttgatgggcatgtggtcgtttccacattttgacttttgtggataaagctgctttgaatattcatgtacaagtttctgtgtagacttatgttttcacttctcttgggttagatttgtttcacctttaaatctgtcaagtatgatgtacatttttgtggataaatgtatggggtacaagtgcaattttgttacaggcacagattgtgcagtggtcaagtcggggcttttaaggtatccgtcacctgaataacatacattgtactcattaagtattaattaagcttcttggctgggcgcagtggctcacgcctataatcccagcactttgggatgccaggatgggtggatcacctgagatcaggagttcaagaccagcctgggcaacattgtgaaactccatctctactaaaaatacaaaaatcagccagatgtggtggcgggcgcctgtaatcccagctactcaggaggctgaggcaggagaatctcttgaacctgggaggtggaggttgcattgagccaaaatcatatcatgccactgaactccagcctgggtgacagagcgagattccatctcaaaaaacaaacaaacaaaaaaataagctcgtcatcctctccccttccactccctcacccttccaagtctccattgtccattccagtctctatgtccatgagtacacgttatttagcttccacttatgagtaaggacatgcaatatttgtttttctgtgtctgacttgtttcttttatatatttttattttaatttttttgacttgtttcacttaagatgatgtacatatttatgccactctgtggtaatggctgttattaaaattctaacagccattctgatcaaatgaattctggttcattttctgaatcttgagtttatattatatttcggggacttttcagtgactcgtctttggggaattatgttttgtgggaaataggctgctttcctttcagcttatttgatggaaatctattgttaacattacaaagaaagctgtctagtctttcacttgctagtttgtgtccttctttgttatttgtagtagcatttaacttttttttttttttgagatggagtcttgctctgtcgcccaggctggagtacagtggcgcgatcttggctcactgcagcctccgcctcccgggttcaagcaattttcctgcctcagcctcccgagtagctgggactataggcacacgccgccacgcctggcaatttttgtatttttagtagagatggggtttcaccatgttggccaggatggtcttgatctcctgacccctgacctcatgatccacctgcctcagcctcccaaagtgctgggattacaggtgtgagccaccactcccagctgcatttaactttttaaaccatttacaaagcactttctttttatgatattttggttttttggggtttctttgtttttgtttttttgaaagagtctcactctgtcgcccaggctgcagtgcagtggcacagtctcggctcactgcaacctctaactcccgggttccagagattctcctgcttcagcctcccaagtagctgggattacaggcacctgccaccacgcccagctaattttttgtatttttagtagagacagagtttcaccatgttggccagggtggtctcaaacccctggcctcaagtgattcatccaccttggcctcccaaagtgctgggattacgggcgtgagccaccaacgtgtattaactgtggagctttattgttctgcatattttatacttaaaccaaataaacattccataaaactaatttttcattttttcttgacagatcgcttacaaccttggggttggttatatcatcactggctgaccaggcagctggcaagggtaaaagcaaatttgtgccttatcgagattcagtcctcacttggctgcttaaggtaatccattgctctagtgttcttttccaactaaaaattggctattccagatgtgacagagtaaaggtgtgtacaaagctaaccaaatacctaaagaactctcctgatgacagttattctaattcctaggaacacagaatgaaaactattttctactcctttttattccatttgaatgctgtttgacaggccttattcattgcttgaatatagagaggacacatttcatcttgtcatgacgttatttgtgaaatgcaagtccatttccacataatgtttccttcatagagaataatgtcatacctaacacatttagtgcttttatcatatgtgttgtccatggaatgggcttcctaagatgctgtttgaaatacttggcaggacaacttggggggcaacagccaaacctctatgatagccacaatcagcccagccgcagacaactatgaagagaccctctccacattaagatatgcagaccgagccaaaaggattgtgaaccatgctgttgtgaatgaggaccccaacgcaaaagtgatccgagaactgcgggaggaagtcgagaaactgagagagcagctctctcaggcagaggtaaaagcagcctggtactccctgctggtaaagttccctggcttgcgggatttgactggcaagggtgtgctcatttgcaattgtaggtcatctgatatggtttcgatttatgtctctacccaaatctcatgttgaattgtaatcaccagtgttggaggagtggcctggtaggaggtgattggatcatgggggcgaacttcccccttgctgttctcgtgatagtgagttctcatacagcctgtggaaccatgagccaattaaacccccttttctttataaattacccaatctcaggtatttctttatagcaatgtgagaactgactaatacatcatctcaatgtggttcagcacttcagtgtttattggcatctgccaaatgctaagcattgtgaggaccaacatgagtaataccatactctgtcctaggaacttatagtcatggaaacaaacaaataagagataattcctgctactacctgatcatttgcttccctaaatcagttggcctttgaactttcagtgggaaagtatgttgtttatattaacattataaactattatttccacagggccttgcaattttcagagaatttagttaggtgttatctccttgttaagctgtggaaacggcgtgatcaaagataattaaacattaggaataattcagaaatctttttcttttccatttatatcaggccctgacaagaaacaaaatctttttgcattgttatcttctttctttggctttactgaaactttaataatgatatactcttctaaataggtgttgctttttgcaaattattgggtgaggcactgtcttatttgaaatatttaagaggacagctttggaggccaagtgccttagtttaagtcacagggttccacatgccaggacttgggagtgtatctgacacttctaagttcacattccttcaccactctcttctgaccccactgtagttgggagagtactaagttgtaagaaaaaaagaaagaaagaaaaacacagttaatggccattatttatggagcatttacatgccaggcactatgttaatacttctatccatcagcatattttatcaaaaagtaatcaatagaagactgaaaaaacaaaaaggtgaagccaagagtctgaatactctattaattggtgatcttggcattacattgtaattgtttgtttatatatctttctcttcttccaggctgtggctcttaaagtacaagatgctgtgttttattgatttttttatccccaacccctagcctaacattgatactagaaagcacttaccacaataccttgcacatagtaagttctcaataaatgttgctgatttttattataatttataatcattcagtgcataaagtataattttcagatagattgtaagaagggtagcaaaacaccagaaaaataaaaatgctgataaaccttgaaaatagtcatgatgctaggaggaaagtataatggttctgcaatgtgtttataggtggattatctacttatttgcatttttactgtgaccacataatctgggcgagatggctcaagcaatacctggctgaaggaaacagaagaagagccagccacataggtccacctagaattttctttttctgtttcttttttttttttttttttttttggcgggggcgggtggacagagtctctctgttgcccgggctggagtgcagtggcaccatcttggctcactgcaacctctgtctcctgggttcaagtgattcttttgcctcagcctcccaagtagctaggattacagacaggcatgcgccattatacccagtgaattttttttgtatttttagtagagacagggtttcgccatgttagccaggctggtctcaagtgattcacccacctcagcctcccaaactgttggggttacaggcaggagccattggcctggcctataattttcatatatgtcccactgtactcagcactaaatgccactgtcaggctctgttaataccatgagcctcaggcatactcagctagcttccagatcatcacatcccagcttcttgtccaagctctgccatctttcttgttcatagagttttaactttgtagaggctcatgttactttaaggtgtcaaagcatattattgacaagtaaaggcctctcccctcaaaattttgttaagctgcaagtatctgtattgaaacctcttagttactctccctgaacaaactagaagggaaaccactgcctttttagccagctgtgctgcttctgggtgaatgataatgataaataacaaaatgcatgaccatcagtggagaaaggtagtctaaaggcccagattcaaaatttaaaatacatgagaagtctttaccttttctagcagattaatttaactggaattcatttattgatgatgagtgttaacctccgtcttattgaaaaagaagtctgcttaagtaaccttttgtcctgcttatctatttcaaagttgaacgttagcatcttttagggctttaaatgtgaaatttaagtataatggataaaatgactaatgatttgtttcattttcattcaggacactggtatttctttttcagggaacagccatgttctcttacattcgtttgattaataaaggttaaaaacccaccctaacagcatataacttaattttttccaacagactattgataactgcttaagagggacagtaactgattgtcttgtatatgatggtggaaaaattttgaacatcagatatctctgatttcattttaaaggccatgaaggcccctgaactgaaggagaagctcgaagagtctgaaaagctgataaaagaactaacagtgacttgggaagagaagctgagaaaaacagaagagatagcacaggtagcttgataatttagccctaaaatattgggattctttttcacttattgtcttttctgtgtagtttgctgtcatcttcagaaagtcttttttttttttttttttgagacggagtctcactctgtcgcccaggctggggtgcagtggcgtgatctcgactcactgcaacctccacctcccgggctcaagcagttcgcatgccgtagcctcccgagtagctgggattacaggtgcctactaccatgcctggctaatttttatatttttagtagagatggggtttcaccatgttggccaggctggtctcaaactcctgacctcaggtgatctgccagccgcagcctcccaaagtgctgggattacaggcatgagccactgcacccagcctcagaaagtcttttaagggcccttttctgctgaaccagagattgcaaagatcacttttttttttttttttttttttgaagacaaggtctccctctgtcacccaggctggagtacagcagctcaatcacagctctcttgcagcctcaacatcctgggctcaagtgattctcctccctcagtccccccaagtagctgggaccacaggcatgtgctaccatgcccagctaattttatctattttgtgtagagctgtggtcttattttgttgcccgggctggtctcaaactctgagctcaagtgattcttctgcctcagcttcccagagtgctggggttacaggcatgagccactgtgcctcgcccagcaaagatcacttttagacattgacgtcaggtctttttatcaatgtacagtttggcctgtatatttgctagacgtgttagatagcactaaatttgaacaagcatggttacagaaaatgtcattcatatttcctgctcttcacatttaaacgaaagtctgccttgtgatttttttttttttttttttttttttttttgcagacagagtctctctctgtcgcccaggctggagtgcagtggcgcaatctcggctcactgcaacctccgcctcctgggtacaagcgattcttctgcctcagcctcccgagcagctgggactagaggcttgcgccaccactcctggctaattatttttgtactttagtagagatggggtttcaccgtgttgccccagctgatctcaaactcctgagctcaggcaatccacccaccttagcctcccaaagtgctaggattacaagtgtgagccactgtgcccagccttgttttgtgatttttagatcacctggcaaagcatgaggctacctgatttttattttattttattttatttttatttatttaattttttattgagatggagtcttgctttgtcacccaggctggaatgcagtggcgcaatcttggctcactgcaacctccgcctccccagttcaagctattctcctgcctcagcctcccaaatagctaggactataggtgtgtgccaccacaactggccaatttttgtatcttttagtagagtcagggattcaccatgttggccaggctggtctcaaactcctgacctcaggtgatccacccgccttagcctcccaagaggctacctaattgacagagaatttgtaacgtatagcatatcataatttttcaatgtatttgattctttgggcttgttaggaaatgctgtatgtttatattttaacttttacttaagttaaaatataaaggaaggactaattctcggggttatgtgcattatgaatttctctacattatatatttcacgaacatttttaatctcattgatcatttggaaatattggaccatcccaatcacgtagcttaacagcagtcactggaacccagtccagccttctgctgatgtgtttcttatagatatcgttcacacccacacatacccctacacctcactcactgtcccgcttaacattgctttatgtttctccatagtacttaacaccattggaaattctatgtaccatattgacttaactgttttcttatggcctgtctcctcccaccagaatataacttttcatgaaagacgggacttcattgggttcagtgctgtattcccagcccgagatcaatacctactacattgtagactctaataaatatatcttgaatgaatgaatgaatgagtgaatacaaggccttccgcagtagagacccaaccttctcttccagccttaactctcactgctttctgatatttgccaggggttcttggcccctgaaatcatctagtatgtccagaacctttctttagtgtgcttccgtatgccatgccccaagaacaccctatctttatatttctgttgaaattattcttatgcttcaagaactatctcaaatatatcctctttctgcagcctttcttggtctcttaacccatcatgatgtctctcctgggaagcccctggcattttgtacccttcaatagcacaacactctcctcttttgtgctctagttatgtggtcttgttccctctactagattctaagctccttaagagccaaaatggtgtctggttcatccttggtgcccctatcacgcctgccacaagatgtcatgcactgtagactctctgttaatgtggttgagcagagtagcatgtgtaatcccattggcattgtccccagaaacagtgacttactctttccgtggatacatcttgtgaatagaacaacaaacagagtttccttcttttgtctgtttttgtgcacaggaaagacaacgacaacttgaaagcatggggatttccctggagatgtccggtatcaaggtgggggatgacaaatgctacttagtcaatctgaatgcagaccctgctcttaacgaacttctggtttattatttaaaggtaggagaacatataaatacatatgcaatcaagattcattcctatacagttcgtagttgaatctgggtgcctgtctctgtgatgttgctttttgtatccagcttagccctcagtaaaactaagatggatagtgccctccgatcaccactgagaaggaaaaacagctattttgtatcatctggggctgtgcagttggggctgatctcctgtgagtccaggcttcagagtggcataagtgggcaacagtaggtgtcgaggtgatgcctagctttatgagaaggctctaggtgtgagatggtgaggattctgggaatatctgtgttcttccacaaagctcctgagaagctctggaggttcttagttatgcttctgagtaattccaaggagatctcaagatcaacacaagcctaaaggagaccctcgtcctagattaaatagacaacaatgttcttctaggtctatcccttgtaaacccacatcctcaggaaataacttttggtcccataatcacccttcaggtgtagaggtgggatggggccgccctgttgccactgtggtcgcaggacatgccacgttggatagcttactgtagcatttctcaaattttctgacttcagaacccatttacactcttaaaaaaagtatcaaggactccaaagaactttcatgtgtctgggttatatccgtgtttactgtattggaccctaagactgagaacattttaaactacaaacataaacgtacaacccttagccctcagggctataacatcattacatgtctcatagactctggaaaattccaccaatacacacacacatgataaaatgagagagcaaaggcaaacaacatgttcatgtttctattgaagtagttttgacttcataggcctcctgaaaggttctcagagaccccgggggttctcagatcacacttttagaactgcttgcttactctgcaaagtgagaaataagatatctgattgacattgatttaggacactgtgactgacataaggcattcagccaaccatcagggcatttttaatctcacacatacacacactttctgagttacagaaacgaactttcaaggattggggacctggggccttgaaggcagcttacatatgctgtccacacacctgaatctctaaatgcgaaggtattgcctgcttgagaacagtgagacaccttgttaaggattctgatctgcctagtaaatacataaaatgcaatggagaataagccaaaattgaagcaaggagcctcaccttctacttttcctagaggtgtaaatttggtacaaatagcccctgagttattgagagtcccccaacaaacttaagatctgttcatttaggcaatgagtaggggtaaggaattgtctctgaaatcctgattttgaaagaccaatccttatactttctctgtcaaatagggaggtattattatagttattaaactattttaagagcaatagaaaaaaatgggataagcagtggctgaatcaccaatagtcacagtcctcgtatgtctgaggttcaggtacttaaaatcacatgaggccaggtgcagtgtgtttactgtattggacgctatcagtgtcaatcagatgtcctatttctcactttgcagtgtaagcaagcagttctaaaagtgtgatctggggtctctgagaacctttcatgaggcctgtgaggtcaaaactactttaatataaacacgaacatgttgtttggctctgctctctcattttatcacgcatgtattggtggagttttccggagtctatgagacatgtaatgatattatagccctgagggctaagggttgtatgtttatgtttgtagtttaaaatgttctcagtctcacgccagtaatcccagaactttgggagaccaaggcgggcggatcacttgaggccaggagttcaagaccaggctggcgaacatggtgaaacccccatctgtactaaaaataaaaattagccagacgtggtggcgcatacctgtaatcccaactactcaggaggctgaggcaagagaatggcttgaacccaggaggcagaggttgcaatgagctgagattgcaccactgcactccagcctgggtgacagagtgagacaccatgtcaaaaaaaaaaaaatcacacgtttgtacatggtatgacccacaggcattaatactgtatgtaatatcagtattagaaattcaaaatttttagcattttcaaagttgaatattttaaaatattactgtcaatgaaactgctttttaatggttcttaaatttatgtaactgttttcaaaacactttcactgttaactcagatgatcctaaaagaaatctaaataggtgaaatagataatattattctggttttgccaacaaagaaactgaggctcagagagtgaaatggcttccccgtggtcaagtcacaattgaaactcaaagtattctactgtcaagtccaatttcctgtgttaaaaacaataactaatcattgttgattggggattttttttggtagtgtttaaacatttttttttaatttggtgtattaagggtaagcgttttacttttaatgcttaagatatttaacatctctggcaggattcgtttaatatttttgtgcatatgctgctgcgttattcaaattgattgtgatacatttttgctgagttactcataaatgtgggtttttctttccttaataatcttttactaggatcacaccagggtgggtgcagatacctctcaagatatccagctttttggcataggaattcagcctcagcactgtgagattgacattgcatctgatggagacgtcactctcactccaaaagaaaatgcaaggtaagaaaagtaaatggtgacttcacgtgtcttgtgtgccttattttcagaaggagaaggctgcctctttctgtttgctttcagctatattaaagttaaggatacatgggggtcctcagggggcccttgctttctgattgtagagagtgattactgtgaaggagtgactatttttgtatgcgagttctagttccacttaatccataactctgagctttagaaccctgtaaagatcaggagtccaattatgagagtaagtgaaaagagtaacttattggaaaatgaaaactcaaagtgacatttcttttctttcttcaaactttacctgacagtcctttggcaaattaaccttcaattaactatttagttatcttgtccacctccagtgttttgttttgtttttaaataccagaaaattggctaggcggggtggctcacacctgtaatcccagcactttaggaggctgaggcaggagtattgcttgagcccaggagttcaagactaacctgggcagtatagtgagacaccgttgctacagaaaataaataagaaaattagccgggcatggtgttcaattcctctagtcccagctacttacaaggctgaggtgggaggatcactgaagctcaagaggtcgaggctacagtgagccatggtcatagcactgcactgtagcctagcctaggttacagagcgagaccctgtctcaaaaaaaaaaaaaaatgtagagagaataatataatgaaaccccatggacccatcctccagttttaaaaatgagcatctcatagacagttttgttatttatatgccttccatatctcctcctccttcctaaagcaggccaggaacagtggctcacacctgtaatcccagcactttgggaggccaaggggggcatattgcctgagtccaggagttcaagaccagcctgagcaacatggcgaaaccccctactctacaaaaaaatacgaaaaatgagctggtatagtggtgcacacctgtagtctctgctactcgggaggctgaggtgggaggatcacttgagcccacgaggttgaggctgtagtgagtcgtagttgctccattgcactccagcctggacaaccagagtaagaccatgtctcaaaaagaaaaaaaattattttatttatttattttttttttaatttattttgagacagagtctcactctgttgcccgggctggagtacagtggcaagatctcggctcactgcaacctctgccttccaggttcaagcaaacctcctgcctcgcctcccaagtagctgggattacaggcgcccaccaccatgcccagaaaaaaaaattattttaaagtagattccagattttataacattgtatctataaatatctcactatgtctctctaaaagatgaagattcttaaatatagtttcaatatcatcatacctaaaataattaataataattcgttactaatcttcatatagccagtcagtgttcagatttccccagttgtctcatcagttttctttttcagttgtttcttgaaattaggatccagataagatcctaccattgttttatagtattcctcttagatctcttttaacaaatgggtttcctcttcctctcttctgtgtgtgtgtgtgtctgtttatccctgtctctctctgcctctctctcttcttccttgcattttatttgttgaagtcacctcattgttgatcctagaggttcccacagtcaggattttgctcactgcatcccatggcatcatttcacatcctccattgttctctgtatttcctaaattggcatttaaatgtggaagcttgatcaggttcagctcaaattttgacaagaatagccatgggtggtgctttctgtctccatcaggagtgcatcatgttaggttgtcattctctgaggggtgttggcagcccttggtcctcatggcttagattgtgtgttttcatagtggttacacattctgctcttccttctttaagcgttagttggaatgcatttattaagagaaagctcccctagttatctctttggctaccaggacaaggtcttgtgctccttcccatttacctggtattttccctcgtgttctcccaggtcctgtgtgaacggcacccttgtgtgcagtaccacccagctgtggcatggtgaccgaatcctatggggaaataatcacttttttaggtaacatctttgtgttctgtaatatattttcgtatacattttttctgttatctatttaagtgtaaaacaagttgattttctctaatggtgaaaaaccccacagaataaacttacctaagaggaaacgtcgagattggttgaaagactttgaaaaagaaacgggcccgccagagcatgacctggatgcagccagtgaggcttcctctgaaccagactataactatgaatttgcacagatggaagttatcatgaaaaccctgaatagtaatggtaagaccctcactctgtgttccagcgccttgggcatttcctcacctcacaccattcagtgagggataagcatgcatcaggtgtcattccgcattccacattttaaacacataaaactgctcatttctttaaaaggccatcagtgaataactaatgacaagatgtgggggagatggtcttctccctcagttacaatgaggatatggatggtcccgtttttgagacctcttattcccaagcgaattgtggtgacatttccacgggcctagagtactgaatgattttgacaaaattccttaccaaatttctcatcatcgagcctgtcatatctgaatccttgagaatgtgaaaatccccaacagaatataaattcaggaatttcaaatataatctatggaaagataaaagtcacagcattttagtataaactcaattggaaattttaccccaaagatatttatttaataagcccagatcacttttacaaaaatgagagtgaaaatgaaatgctttatagcctctttatttgacttataccaagtttcacatctaaaagtccgtgttcctttaccttttctttcttattctgtgcctatacacacctgcctgcattaaataaaatagacaccaaattctttccttttttgctgttttataaatctgccctttcttttcccatctcccagtgtcttaattgctagatttgatgactgggacttagaagccagaagcaatgttcacctgttaccaaccacaagatgacatttctgggactagaatgattttatgaggataaaactgaggctgtttaggggtacctgagaaaggtagtttgtaggctcagtccaacctctccttctcattcatctgatcttggggcacctgaggttccctaacttgaaccagggtggacctccagggccctgagggccctaagacaggcagcctctacctgacagggggcttgaagagcattttggtgttttgttttttttttttttttttttgagacggagtctctctctgtcgcccaggctggagtgcagtggcacgatctcggttcactgcaagctccacctcccaggttcacgccgttctcctgcctcagcctcccaagtagctgggaccacaggcgcccgtgaccacacctggctaatttttttgtatttttagtagagacggggtttcaccgtgttaaggcaggctggtctcaatctcccgacctcgtgatccgcctgtcttggcctcccaaagtgctgggattacaggcatgagccaccacgcccagccgagcattttgtttttcacagttgagctcttcccttaaacattggctttctcactttactctttgagcctatctgggaagaatttgagcatagagaattgtggcatatgtgctgccaaggcaagcacatggtgagagaattatcagatctctggcatatcaaattggggattctgttgcaggattaaagcttttggccttttcattgatttctgtttatgaagtttttgcctagggggcctctttttttaattataaaaatgaaatgtagggccaggtgtggtggctcatgcctgtaaatcgcagcactttgggaggcccaggtgggcagatcacctgaggtcaggagtttgagactagcctgaccaacatggcaaaaccccatatctccaaaaaatacaaaagttagccaggcatggtggcacatggctgtaatcctagctactcggaaggctgaggcaggagaattgcttgaacccaggaggcagaggttgagccaagatcgcatcactgcactccagcctgggcgacagaatgagactccttatcaaaaaaaaaaaaagaaatttaaattaaacgccaggcatggtggctcacatctgtaatcccagcactttgggaggccgagacgggaagatagcttgaggccaggatttggagaccagcctgggcaacatagtgaaactccatctctactaaaaatacagaaattagccaggcatggtggtttgcacctgtaatcccagcactttgggaggctgaggcaggaagattacttgaggccgggagttcgagaccagcctggctaacgtggtgaaaccctgtctctactaaaaatacaaaaattagccaggtgtggtggtgaatgcctgaaatcctagttacttgggaggccggagcacgagaatcacttgaacctgagaggcggaggttgcagtgagccaagatcacacgactacactccagcctgagcaacagagcgagagtctgtttcaaaaaaagaaaggaaagaaaggaaggaaggaaaaagagagggaggaaggcagggagggggaagtggggggcggggagagagagagagagagaaagacagccagccagccagactgtgaaaaacaagtgtaatgtatttatataaagagtataggggccaggcacggtggctaatgcctgtaatcccagcactttgggaggatgaggcaggtggctcacctgcaagaccagcctggccaacatggtgaaaccccgtctttactaaaaattaaaaaataaaaatttagccaggcatggtggcaggtgcctgtaatcccagctacccaggaagctgaggcaggagaatcgcttgaacccgggaggtggaggttgcagtgatccgagatggtgccattgcactccagcctgggcaataagagtgaaactctgtctccaaaaaaaaaaaaaaagtatagaaccatgaagaaaaaagtaggaaaaaacaactttatgagaaagtttggcaatttctgtctttaaacagtaagagtagagtgttaagattagccactggggcttttggccctgcagtgcagggtggaccatagctaggagtcaagattcattccactctgttacttccccaccaattgggaggaatcccagagacatttcgaagtgacgttcagacatcagaatcacattaatgggttatttaacaacctaactgagcaacaagtctgctgtgagtgatcttttggaagcctgagtggatatagggtgttcaggaggatgtagactccaaactccaggtggaggaactcccattggagacagctcattgcttcagcggacgttacagaatctagacatctctagtcgctaactctgcagagtttacaggtggtatcagtttaatcatttagccctccgagatcacaggttccttatttgaatcaattactaccttcttatatataaattaactccttcaataatcaatgagtattcagtaagcatttgttaattcctctgatcctctcagccaaaccaattggagtcatcagtggcctggtgcacagtgttaacatgaattattcttttgtatcccagatcaggccttgctctccagtgttgattttgtccatattgaagtcatatttatggctgggtgcagtggctcatgcttgtaatcccagcactttgggaggctgaggtggacggatcacttgaggtcaggagttcgagaccaccctagccaacatggtgaatcccagtctgtcttaaaaatacaaaaatttagccaggtgtagtgatgcgtgcctgtagtctcagctattcaggaggctgagacaggagcaccacctgaacctgggaggtggaggccgcagttagagctgagatcgcaccattgcacttcaacctgggtgacagagcaagacttcatcacaaaaaaaaaaaaaagaagttatgtttccccctaccccatcctttacccagttccagtggagcttccctttggggcatacacacagtctctgatgcaagtgctgatgtgccggtggctggacggtgttcactgtgattcccctctactgctaggtggcttcccgataataagcctgtctgcctggtggtcatccccttggtggtcttatttgaagatcctctttcctctcatgtggtttcagacgaagctcctccacaaacactgggataaaggtttttaactgattggcattggcatgagggagcttggctggtttttagcagtgctgctgattgatgctcatgctccatgctttggcaaaaatctaactaacatgattgggaagaagctggagttttctggctgatgaaggtgttctgtattcttcattgaggaatgttccttttcaattatgaacaccccacccccaacacacacacacacacacacacacacacacacacaccatgtcccaattccatttgcctcccagattttggttaaactctaacagcagctattctgtatgtgtgcaacagcactgaaaagtattattggtattattactgctgttatcgatggctttgttgctgttgacagcagagcagttcaggtcagtagtacttccagatatatattcacctacagtatcccagtaataggtaagattaatgtatttttttagtttctagagtaaatactgatctaaaatccaattcatttgaattaaaagtaaaaagaaacctagtatttgtggacaataatgccttcttcccaggggtttgaaataggaatcagacaaaataagaatcatctcttttttcaatgtcaatggcagctctaaagaaagtgcaactttgccaagcgcaatggctctctcctgtaatcccagcactttgggaagccaaagtgggaggattgcttgaggccaggagttcgagaccagcctgggcaacatagtgagccttcatctctacaaaacattttaaaaataaagaacaattaaggggctgacaaagggtcatgcgtagtgccagtttgttccatctgggatcaaatagttctttttttctccaaagatctgtttcccctcaattcagttttttagacattttggtgttaattaattctaattctctttcttatatgaataccctgctaccagcaccactaccaccgccattttttcttttccattcttgggatgatgggtcggtttgagctcattgcatagttacctactaagtaaagaagaaactaatgaggacgagaaagtgctatgcccaaagtaaacgtggtcctttcttttttcctaaaatacttacttctttgagatcttggctttgggcacctggctcactatttaaaacagttcattcaagagaaggaaaatgataggaaaaataaacctgtggacaatctcttgatatttggttggtattttgagaaagggctgaataatctttggcttccgtcctgggccacatcatagagtcagatcgacttgctgatttggatggtctgtttgaaaatatgctgtgtgtggggtaaagacttgaaactggttaattgatttgaaaagaaaatgtcatcaaagttgtccgtgagaaaggtgtttgcagactaatgttagggatcagaggcgaaacaaaaccccagcccctagacctccaccgtagctgtgtgtggtgagggcggatctgggagttcgggaatggggcttacaagactctactgtgggagtctcagaggaaggacggattgagttgctctgtcttctgtatttgcacttcaatttgtggccactcatcatgcctagtgagtagtggtagtgctgtgtcatgacagctgctggtgcagtttcaaatagcctcactcacgtggcctgtgtcagcatggaaccttggggtgagatcccctctgccccagtcatttgggatcatgtgtgtttctgcactactgactaacaatggaaatgtggattatatatcttattcagtatctcgtagcaaaaaccctataatgcagttttataaaacggtgtgttttccagcttctctggaaaagatttataaacactgttaggacagttgggctccatctaaatataaatggatggcaagtactgtagcaccctgtcctttcttttttaaacccagagcctatatactgtttgagaaatatgtgtatatatttttttaattctgaaagaacttttcttctctagagcttacatttaaaatgtcttcagatgccctcaaaaaaattttaccatatttctcatatttttttagaagttataggagtttgtcagaagttctgatgcttaggaatacataggttgttattatatagataatattttacccacccaggatctatgtttgcataagattttttgtttgttttttggtttgggttttttcccccagtttatattcttttctttctttttttgagatggagtctcactctgttgcccaggctggagtgcagtggcacgatctcagctcactacaacctccgcctctgggttcaagcaattctcctgcctcagcctcccaagtagctgggactacaggcacatgccaccacgcctgactagtttttgtgtttttagtagagatagggtctcatcacgttggccaggcagatcttgaactcctgacctcaagtgatcgcccacctcagcttcccgaaatgctgggattacaggcgtgagccaccacgcctggcccccagtttattttccatcagctttttaagtgatatattttaggtcatgaggtcaggagatcgagaccatcctggctaacacggtgaaaccccatctctactaaaaatacaaaaaattagcctggcgtggtggtgggcacctgtagtcccagctactggggaggccgaggcaggagaatggcttgaacctgggaggtggagcttgcagtgagccgagatcgcgccactgcactccagcccgggcaacagagcgaaactccgtctcaaaaaaaaaaaaaaaaaaagtgatatattttaggaactcatgtcaggactctacaaagaaaactattttgcttctttgaaaacatgctgaattttagaattttatatcaataaaacagtatctttttcaaaagtatcactctttcacagaatactaattgtaagcaaaacattgggggtaagagtaccacatcagtttattaccaagtgaatgtcctaccccagccaattagttagttatctgagttaaaaacctgaccctgtcactttgtagctacgtgttgtagatcagctgtttagcctttttgagccccagtttcctcatttttaaaatcgggatgatatccacacttaggcttgttgcaaagctttcatgaagtgatgcatgcaaagcagatagaacctctacttgcgatgtagccaggagctagtagagttattgttgccattgtggttgtcatttttattaaaacaactcatctatactgagcttttcttgtgattttaaaaaaattgattctttttgttttgaattatttaactttattttttgaagctaacatgctatctttttctcttaatgctaatatagaaaattattacaatttacatgtgtattttacaagttgatagggtatcttggaaaaaccagtcaatagcaatcatcaggtaatataaaaattcctcctgagtcactttaattttcagcttcttttctggaaattaaactgagtgccaatgtgtgggaatacagcataaatggcactgaatagcaggcaaatgtgtgaatgtacaaggagaaaatcatgtcccaggctggtctgagaatgcatctctcagtccaatatagttctgggaaatattaactgtgatgatgattttcttgttctactattgagattgtctaacattctccttccctacactgtcctcacttagtgatgtcagtaactttctccttttgtacatgtgacccagagccttgatctttctccacagtatccagcttattggtcattaccaagttgatatcctgcccagcccattaggatttacctataccacaaccatcacggtagctcattggagcaagatctgttagtacatctataccttttcacccatgtgcatggtggtgagctctgtgcctgtacacgtgagatgttagaaacaggtttttattatttttgcaagtgaattgtccttttagatactagtctgagaaattgccagaccatatccttaagcaatattttcaaacatgtgctgtgatctgtaagtttcctcccacttagagaaattcaatagtaataggatttgtggtgaaagtcataaatctttgtcgtataccaaaactgatattaaatggacatagaaatgaattaccataaagaaagatcaaatcttatgtgcttctgtgtttggaattgtcctagatttcgtgaagtttttcttcccagtggataagatcacattcctctctcttcccccatctgctggtagtaggttaatgatttatctaaacgttaggatgagctcatcaaattgaagaaagtaacgtagaggatgtggagaatgtatacttataaagggcatttatctgcaatgtctgtaacaaggaatttgagaggatttccctgatgtggcccctcaggcctctcacaaaaagcgtattgactggctagattccttgctagaggaagcctcccacaggctgcagtgcctggcatgaatgcttgttttagccgccactaagacaccttgccttgtctcttggctcactagacccagttcaaaatgtggttcaggtcctggagaaacaatacctagaagaaaagagaagtgccctagaggagcagcggctcatgtatgagcgggaactggagcaactccgccagcagctctcccccgacaggcagccacagagtagcggccctgaccgcctggcctacagcagccagacagcgcagcagaaggtgacccagtgggcagaagagaggtaagaactgcagcgcgggcagcccagagtcaaggccccaaggccgtgggtctttgagggaggggtttttgagacatgtcagggacaaacctagcaacaagagaactcttaatcccatacgtgatattgccaattagcttttcctttcacaaatattgtccaccctaagtatgtttactataatgttagctgttaaagacccctcctacccccaaaccatttacccttcaataaaaatggtgccaagttgcaagggttagacaggtatgtattgaaatttagaaagtttgaataatttctttaacacaaaagcatttttttcttatttctcatacttttgaatctatttaaatacaacttcagtgctgattaatctactaaatgtgaaagtttaagatttatagctgggtgcagtggctcacacctgtaatcctagcacttggggaggctgaggcgggaggatcacttaagcccaggagtttgaatccagcccaggcaacatagtgagaccttgtctctacaaaaagtaaaaattacccaggcgtggtggtgcatgcctataaggtcactgggaggatcgcttgagcccaggagtttaagaccagcctgagcaacataacgagaccttgtctctacaaaaaataaaaaattagccaggcatggtagctggtgcctataatcccagctacttgggaggcttaggagggagggtcacttgagccccagagatcaaggctttagtgagctgcgatcatgccaccacactccagcctgggtgacaggaagaacctgacctgactcaggccaggtgcggtggctcaggcctgtaatcccagcactttgggaggccaaggcagcggatcgcctgaggtcaggagttccagaccagcctggccaacatggtgaaaccctgtctctactaaaaatacagaaaaaaaagaaaaaatagcagcgcatggtggcaggcgcctgtaatcccagctacttgggaggctgaggcaggagaatcgcttgaacccaggaggcaatggttacagtaagccaagatcgcgccattgcactccagcctgggtgacaagagggagactttgtctcaaaaaaaaaaaaaaaaaagaacctgactaaaagaaaagatttatgactttaaaatacttatatcagaactctcaaaggagaaagtggtagagtgtgggtggcaagccacccaggtgccaaggcaagagaccaagggcacaagctgttccagtataataaagctaatatatagaataagaatagttatactagaaatagattatagatatgattatatatgaatatcattaatcattagtttgtagcattactctttattccaatattataataatctttgttctacagttatcacctgggaaaaaccagccatacagagataggagctgaagggacacagtgagaagtgaccagaagacaagtgtaagccctctgttactcccaaacagggccactagagggctccctggtctagtggtaaggccagtgcctgagaaggcgcccattacctagcgggccttggtctagcagtagcgtcagtgcctggggaaggcactagttacttagcagactgggaaagggagtctcccttttcccgggggagttagagaagactctgctccaccacctcttgtggaaggcctgacatgagtcaggcccgcccgcagccatccagaggcctgtctccctgtgatgctgtgcttcagtggtcactctcctggtctgctttcatgttccaccctgtacgcctggctctgccttctcgatagcagtaacaggattagcgaaagtacttaaagtctttgaaatacatagaagaaataatggtgtaagctgtcctctctctgtctccgccttggctgccaaacagggaagggacccttgtccagtggacacatgacttgcgtgaccttcctgtcattggtgatggctcacactctttcccctgcccccttttcttgtatccaataaataacagtgcagccaggcattcggggccactaccggtctctgcgtctaggtggtagtggtcccccgggcccagctgtcttttcttctatctctttgtcttgtgtctttatttctatgatctctcatctccacacacgaggagaaaaatccacagacccagtggggctggaccctacagtggaggaaatggtaataataataatcaccactaccataataaggacaataggctattgaagacttcagttgtgttcttgccatagtccagtcttttatttaacatcccagcagcagtatgccataggaactattatccctgtcttataggtcaggcaatcagtttaaatatcctgccttaatcaaccatctaggaagtgaaaaaaacagagtttgaacccagttctctctgcagtctcctaataacacctgtgttatgataataattaatagtactaataaaagcaacacctggctgggcgcggtggctcacgcctgtaatcccagcactttgggaggccgaggcgggtggatcatgaggtcaggagttcaagaccagcctggccaagatggtgaaaccccgtctgtactaaaaatacaaaaataagtcaggtgcggtggtgggcacctataatcccagctactcgggaggttgaggcagaagaattgcttgaacccgggaggcagaggttgcagtgatctgagatcacgccactgcactctagcctgggtgacagagcaagactgtctcaaaaaaaaaaaaaaaaaaagccgggcactgtagctcatgcctgtaatcccagcactttgggaggccaaggcgggcagatcacgaggtcaggagatcaagaccatcctggctaacaaggtgaaaccccatctctactaaaaatacaaaaattagccgggcgtggtggcgggcgcctgtagtcccagctactcgggggactgaggcaggagaatggcgtgaacctgggaggcggagcttgcagtgagctgagatcatgccactgcactccagcctgggcaacagagcaagactccatctcaaaaaaaaaaaaaaaaaaaaaagcagcaccttacatctatagaccatttataccatgtaccaggtactaattgctgttcctgtattcctctaatcctcacaactgctactgcctttacacataaggaaactcaggctgagaggttaaatgatttacccagatggtcagttagctggtaaattgggcgatgggatcagagccgtggcattctgactgtagagctcttcctgtaactcacacacacactgcagctctcactagcaatgagatgcagaacacaggccacacccggggaaggtgactcccaagaggagaaaagggaaccctgccctgcagcgcaaggctcgcaacagtcacgcacttgttaatgttaaatgaagagaagagagtcaattatattttccccaggagctacctgctcatctgtctggatactgaaataggaagatttatcatacttatattactcttttttctgagatggagtttcactcttcttgcccaggctagagtgcaaggctggagtgcaatggcatgatatccgctcactgcaacctccatctcccaggttcaagcgattctcctacctctgcctcccaagtagctgggattacaagtgcccaccacaatacctggctaatttttgtatttttagtagagatgaggtttcaccatgttggccaggctggtctcgaacccctgacctcaggtgatccgcccgcctcagcctcccaaagtgttgggattataagcgtgagccactgcaccagatgttatgttactttttatactttattgtacctggaagaaacagacaaaagttatcagatggtcctttttctgaagagctgccttttacacatttactatgagctggtggcttcacgccaagcaacagctagctgttgaggataactgatataattgtacccattgatatcctttctatttactaaacaatataaaagataaaagcaaaagtgtcttcaaaagaagacatacatgtggccaacaaagcatattaagaagtgttcattatcaccaatgactagggaaatgcaaatcaaaaccacaatgagataccatctcacaccagtcagaatggctattattaaaaagtcaaaaaataacagattctggcaaagttgcgaagaaaagggaacccttatacactgttggtgagagtgtaaattaattcaatcattgtggaaagcaatgcggcaattttttaaagagctaaaaacagaactatcatttcacccagccatctcactattgggtatgtacccaaagaaatataagttgttctaccataaagacacatgcacatgtatattcattgcagtgctattcacaataggaaagacatggaatcaacctaaatgtccaacgatagactggataaagaaaacgtggtacatgtacaccatggaatactatgcagccatgaaaaacaacaagatcgtgtcctttgcaggaacatggatggaactggcggccatcattcttagaaaacgaatgcaggaacagaacaccagataccgcgtgttctcactaataagtgagagctaaatcatgggaaccgatggacagaaaggggaacaacagacactggggcctgtgggaggaggagggagaggctcaggaaaaaaaaacaaaaacctgccaagtactatgcttactacccgggtaatgaaataatccatacatcaaaccccttagtcatgagttgacctgtataacaaacctgtgcatgtacccctgaacctaaaataagtcaaaatatttaaattttaaaaaacaaaagtatctgataaagaaggtggtttgcttttaaccatagtgtttttcagttaaatagttaaaaatatttttttgatttcccttaattccagattgattttctttggggcttaaattcttaaaagaaaggaaaagtgtagaagtcgggtacagtggcacatgcctatagtctcagctactccagaggctgaggcaggaggatcacctgcgcccaggagtttcaagctgtagtgcactgtgatcatgcctctgaatagccactgcactgcagcctgggcaacacagggagaccctatctccaagaaaaagagagagagagaaggaaagaaagaaaaagggagggagagaaggaaggaaggaaggaagaaaaaaaaagatgagatattttgggaatgtcattcaaagacaagaatagttgcattattgattttgtcaggtttcactggataaaagtaagatgtcattaattgtatgtggttatataagaagctggaactcttacctaagtaaattgttgatgggttgtgaaataatgaaggactcttacctacatgaatgttgatgggttgagaatcaagtaaatttaaacgctggtgagaattacaaagaaagccacagatgtcgtttattctctttgtacacttagaatgtagtatgaaacaagatataaatttgtggaaaaattaagtcatagaaaattaaagaacagtttcattcaacaataggaaacgttaggattatatattaatagttatttgtttgttttctatttcctaccctggaaaatgagttgcaagggacagggaatcctttgaagtatccctagtgcctagaatgatgtggtcacctggtaggtatttagtaaatattgtatgcattgattgtgtgaatgtattgaagtgaaaagcatgtaatcgctaagtggacagactgcacagtaagcttgttggttgttcagtggaagatgagacttaatgaagctgagtcttctacagaggttttcagggagaaggattgatttcaagtgcatttgagaggtagagtttgaccagcagagagaaagtaagaaggacattttgggtgggcagattggcatgaacagatgagaagcaatggaagagaattaagatgtatttgggagactgcaaaagaactgtttcgtgtagtctagaacaggggtccccaatccccagaccacaaactggtacgggtccgtggcctgttaggaaccaggctgcacagcaggaggtgaatagtgggccagcaagcgaagcttcatctgtgtctacagctgctccccatcacttgcattactgcctgagctccacctcctgtcagatcagcagtggcattagattctcacaggagcacaaaccctattatgaactgtacatgcgagagatctaggttgcatgttccttataagagtctgaagcctgatgatctatcactgtctaccaacacccccagatggaactgtctaattgtaggaaaacaagctcagggctcccactgattctacattatggtgagctgtatcattatttcattgtctattacaatataataatagaaataaagtgcacaataaatgtaatgcacttgagtcatcccaaaactctccctttccccaacctcggtccatggaaaagttgtcttccatgtaactagtccctggtgccaaaaaggttggggaccactggtgtagaaggtgatttatggaagagtagggaaaattaagttcaaaaaccattaggcaggggttgtgggagggtacagatttggagtttgggatttattttatgggagaagaggagccctgcaaggccttgagccgaggaacggcctgaggaaggcagggcttgataaggactgtcttgcagtggagcaagaagagcctgggtactgtgagattattgagaagggtgtaagggccctgagccagggatatgataaaacacagagagacttaggagatgcttcaaaggaagaatcaataggcttattttttggacattgtagaaaagagaagagactgagccgactgaacaaatctaagcgtgggtgactggaaaaatggtatcaccttttttgtttttttttaatagagatgaggtcttgctatgttgcccaggctggtcttgaactcctggcctcaagtgatcctcccacctcggcttcccaaagtgttgggattatagccatgagccactgcccccagctggtaatatggttttaagaaactgttttgtttaccttagcatccgcacagcatgcgtcttctgtcatttctaaggtgacgagtgaggagtagagatttaggtgctttgagttcattatttttctatgatgtaagcatttcctgcggcgtataaatggtggaaaagagaagttatatatggcacagagcaattgctagatggagtgactttagaacccagattcaaatgtgaaatccagaagcactcttttctttattcagtgggtcttttttgaatatcctacgatgggtcatgcacttggccaggagctagggtagtgcaagcaaaaaaagacatggtccctgccttggggcaacctaacagcctagtaggagacagatattaaacaaataattatacgagtaaaaatgaaaagttctaactatggcaaatgctatggaggctaaaggcatggggctgagagaacatataagagggttttgaccaatctgggatattagagaagctttttatcagcaagtaatgttgtacagagagttgaaacgaagaattcctgctactgcagaactaccttaccattgcatgccttttgccaactgcagaagtcatgaaaaataatttcttctcctaactccaggtttctctcatctgccaacccctccctgccccaccaccctccctcagcacacacaagtcgtaatcatcgtttgtttttcccaaagattcctgtactggttttttgcatcctcctatcacaatctgatcgttttcacgtgttacataatttaaaacgtggttttcagttaagttgctcaacaatttgcttcccatcagtagttctcaacagatagcccatctgtgggcaggagggaaggatgagaggtagtctggtaaaatagtttgaaaaatactgcccgagaggagttttctcccattttctaataagatgctcacttagaaacgggattgcagttttcttttagattttctcgttcccttttctatgacactgcagggatgaactcttccgacaaagcctggcaaaactgcgagagcagctggttaaagctaataccttggtgagggaagcaaacttcctggctgaggaaatgagcaaactcaccgattaccaagtgactcttcagatccctgctgcaaacctcagtgccaataggaaggtaagaatgtccttcaagtgagagggcaagatgcacaatagtaaatattgtaaaataggatctaaaactgaaaccccagaaacatgcctgaggagatcctgatatcagccagagatgtttatttttttcaagacattctttatatacctcattggataagaatgctatttaaatgatgttcttagatatgtaataagcagaatacacaaaattttagtggctgaaggacttcctaatttatatgccttctttaaaacaataaaactggaaacatgtattttgcctgcttttttttgcatgtaaatgcccctttctgaaatgggggaatacatgtaggctgtagtacctgagggttttgtttgtttgtttgtttgtttgtttgtttgtttttagactgagtcttgctctgtcacccaggctggagtgcaatggcatgatctcagctcactgcaatctccgcctcctgggttcaagcaattctcctacctcaacctcccgagtagctgggattacaggcgcgcactagcacacccggccaatttttgtgtttttagtagagacagggttttgccatattggccaggctagtcttgaactcctgggttcagatgttctgcacgctcagtctcccagagtgctaggattacaggcgtgagccactgtgcccagcctgctatggtaccttcttaagagtgaattctacaagaaaggaagacttttcatgatacctgacttcaaatacacggctctctttgcaagcgtctgggagtttcctgtcatttcaccttgaagaatttttcctgtagggagaaactttgaagaaaattgtttttcatttttgttgctgttgttgtttatcaggggaacccgcccacaatatttcattgtaggttctttctattttccataagtgtcagccagctgagaaataaagagaaagagtacaaagagaggaattttacagctgggccgccgggggtgacatcacatatcggtaggaccatgatgtccacctgagcctcaaaaccagcaagtttttattgagggtttcaaaaggggaggaggtgtaagaacagggagtaggtacaaagatcacatgcttcaaaggacaaaaagcagaactactaataccagtctagcaaagatcacatgcttctgagggaacaggacagaggcaaaaggagaaccactgataagggtctatgttcagtggtgcacatattgtcttgataaacatcttaaataacagaaaacagggttcgagagcagagaaccggtctgaccacaaacttaccagggtggagtttttccccaccctagtaagcttgagggtactgcaggagaccagggcgtatctcagtgcttatctcaaccaggtaagacattcccagagcggccgtttatagacctccccccacaatgcattcctttcccagggtattaatattaatatttcttgctaggacaagaatttagcaatatatctcctacttgcatgtctgtttataggctctctgcaagaagaaaaatatggctctttttgtccaaccctgcaggcagtcagaccttatggttgtcttcccttgttccctaaaaatcactgttattctgttatttttcaaggtgcactgatttcatattgttcaaacacacattttataatcaatttgtatagttaacacagttatcacagtggtcctgagatgacgtacatcttcagcttacaaagataataggattaagagataaaagtaaagacaggcataagaaattataaaagtattatttgggaactgataaacgtccatgaaatcttcacaattcatcttcctctgctacggttccagccggtccctccgtttggggtccctgacttcctgcaacagttgttgttttttgagacagagtttcgctctttgcccaggctggagtgcaatgacatgatcttggctcactacaacctccgcctcccgggttcaagtgattctcttgcctcagcctcccaagtggctgggattacaggcatgcgccaccacaccaagctaattttgtatttttagtagaggcagggtttcaccatgttagtgaggctggtctcgaactcctgacctcaggtgatccacccaccttggcctcctaaagtgctgggattacaggcatgagccaccgtgcccagccagaaaattgtttttctatgactcagaaaaaaagaaaaactaaatttaaaaaaagtaagaaaattgtttttcatccattcactttttcttccagcaagcaagctagaaaatgagtcagggagtatcttatcagtcttactgggttttagtcttttgacctagtagttcccctttgggaaatttattctaagcccatagtcatagaagtgtccatagagatttatacacaaggatgcttatagtggactttataatagcaaaaccttgaaacagacatgatgtcaaacaatagaataattactcaaatgtatagtacatccaaatgctaaggacactgctgtgttgccattaaaaaatcatggttatggctgggcctggtggctcacgcctgtaatcctagcactttggcaggccaaggtgggcagatcgcttgagtacaggagttcgagaccagcccgggcaacataacaaaaccccatctatacaaaaaaatacaaaaaataaaataaaaaatagtcagtcatggtgtcatgtgcctatagtcccagctacttgggaggctgaggtgggaggattcctggagcccaggaggtcaaggctgcagtgcactaagatcataccacttcactgcagcttggatgatgagcaagatcctatctcaaaaaaaaaaaaaaaaatcgtgcttatgaagaatatttaacaatacaagaaaaatgatcacaatatcaaaactggagagaggattggggtatgaagttatacttttgtttggtcttgatcgtgataaaaattaaaaagtgtgcatgagtgtacatagaaggtagaaaataaaccagactatcctcgtaggtggtagaattttatcttcttttgtatgcatttatgtgttttgcaaacttactgtgttactgttgtatatatattgctttagcaatcgaaaaaggagttataacagggtttgttttgtttttcttccttatgcagagaggtgcaatagtgagtgaaccagctatccaagtgaggaggaaaggaaagagcacccaagtgtggaccattgagaagctggagaataaattaattgacatgagagacctttaccaagaatggaaggaaaaagttcctgaggtaaaagagacaaaatgtaatggagattttgttatgttaaaaacagagaatataagcgatttagcaacacacacacacacacacacggagatgtgctcatgatacgttagatattatattaggaaaataaagtacaagtgattttgaaagaagcgctaagttggatcagtaatacaacacatgatccccacacagttgggaactaaatgaagaaaacatatagtagattcttatttggcttcatgtttactacatttcaagtgaaaagaagtagaatgaagtaaatttatgccattttatcggtgctgtgaaaaatcagcttgactggagccagtgtggatttcgcattcattaatgtgtgttcacgcacccctagctgtgatcgtggccaggtagattactaagagtaatttaagcttgcataatccattttttggacattagcagtggaaaagaagacttggcaaaggagatgaggcaaaacaaaggggatgaaatgaaaaagctgcaagtgaggtagataaggaagacaaggcaggaactgaagaggaatcttctgcacaggcattagttagctccccagcaaacaggcccctcccatgggctaattcttttttttttttttttttttttttttttttttttaatggagacagagtctcgctctgtcactcaggctggagtggtgtaatctcagctcactgaaacctctgtctcctgggttcaagcgattctcgtgccccagcctcctgagtaggtgggaccacaggcgtgcgccaccacgcccagctaatttagtttttatttatgtgacattataattttacttgctgtttaaatggatagattctttaaattttttttcaaatgctagttttaaataatattatttaaattgatgttatgtttcttattcgtccactcactggcccctcctacttctcaggcaaagagactctacggaaaacgaggtgaccctttctatgaagcccaagaaaatcacaacctcatcggggtggcgaatgtattcttggaatgcctcttctgtgatgtgaaacttcagtatgcagtccctatcatcagccagcagggggaggtaagcacaggccagccttggagaacgatggtggttcaagttttttgttttgttttattttgtttttcattctatttaagctatgttcttgaggtggatcaagaaactaaggcaaatagtcaaggtctgcattcttttttctctactaataatcgatattagaagctttgaggattaagtcatggttttgtttgtttgtttgtttgtttgtttgagacggagtctcactctgtcgcccaggctggagtgcagtggcgcgatctcggctcactgcaagctccgccttccgggttcacgccattctcttgcctcagcctcccgagtagctgggactacaggcgcccaccaccatatcgggctaattttttgtatttttagtggagacggggtttcaccgtgttagccaggatggtcttgatctcctgaccttgtgatccgcccgcctcggcttcccaaagtgctgggattacaggcgtgagccacggtgcctggcccaagtcatggtcttaaaagattattataacatttaatatttggaggtcacaagttttttctttgttttaatcaaatgggaaatattttggaaaccatattcagctctgtgccccatatcgctctctctttttaaaggtaatctcatacctttgcgatatactctagttccttcctggcccctaaatggtctttgtaagatacaactcaggaggattattttgcagtccaaagtactcaaaacaaaacaggcttcaatgactcattgttaccctccttttaaactctggtatttcagctatttagatatagtggcctaggtaggcataagatatttcagaaaatgtacgttgaactaccaggttatttcttgtgattcttagagcaggtgaagaataagatgccattctgcccaaagtgaagctgcgatatagacccgggttcccagttgtggggtgtaagtgcacagcccaccctccactatggaaacaccccatggacattctgctccagaggaccagtgcctaacagagctttttcccatgggaaaaatgggcacagttaggagtctgaaaccagcctggtcaacactatgagaccccatgtctaaaaaagaaatttaaaaattgaccaggcatgggcagagtgcagtggctcacgcctgtaatccctgcactttgggaggcagaggcaggtggatcacaaggtcaggagttcaagaccagcctggccaatatggtgaaaccccgtctctactaaaaatacaaaaaaattagccaggcttagtggcgggcacctgtagtcccagctactcgggaggctgaggcaggagaatcgcttgaacccgggaggtggaggttgcagtgagccaagatcacaccactacattccaacctgggtgacagagcaagattctgtctcaaaacaaaaaaaaaaaaaacaaaaaaaaacacaaaaaaaattaaccaggcatggtgatgagcacctatagtcccaccagctactcaggaggctgaggtgggaggatcaccaaagcccaggtaggtctaagcagcagtgagccatgatcataccaatgcaccccagcctggacaacagagcaagaccctgtctcaaaaagaaaaagcacagttaacatggcagagtgattcagtggctgagtccctagttcaggacttcttaatttggagtctgtggtatgctttgagtattccatgaatccccctgaaattatattaaaatgaattagattatcgaaaagcattaaaaagaaaaaaaaaagcttggccgggtgtggtggctcacgcctgtaatcccagcactttgggaggccgaggcaggcagatcacctgaggtccggtgttcgagaccagcctgaccaacatggagaaaccccatctctactaaaaatacaaaattagccggcgtggtggcgcatgcctgtaatcccagctactccggaggctgaggcaggagaatggcttgaacccgggaggcggaggttgctgtgagccgagatcgcgccattgcactccagcctgggcaacaagagcgaaactccgtctcaaaaaaaaaaaaaaagcttaagaacaactatcttctgatttcttttatttcctttcttcccccatcttactacttcctccatatttgtcttacttctcagatatcatcgagtaatttcttgtaggtccttggtgccagtaccaattgctgtgtggaaattggatctgatctacctttaaaaataaccttccctgtttaggatgatagcagtactaccagaacatgtgtcaccttgtacacatgtgtaatgacagccacagtcattacaacctgaaactatgttatgaaatataattaagacaaagcactccaagaatgcaaattttagaataatccttttcctctaatttgattctgtgcagccagctttaagaaaaacacggttaaactggctcctatccagagagccaccatgatagaaaatttaaaaccttttaatgaaaaagttttaaagtaacattcctcatatctgtgtggctttcaatatgctgttcctcctggattagatctaatggcactgctttatggagccctccttcatcctgctcccagccccagtctgagttacacacccattctctactctcaagagaataaaagctgcgcgagcccgggaaccttgtcaatttggtttgctattggatgctcatagcacagttcctggcacagttagttcttggtaaatatgtgttagtggataagtttatcccataacaactcgcacatatatctattatagcaactattctatgctgttattagtgagttttgttgctgttgttgttgttgtttttgttgttgttgtttgagaccgagtctcactctgttgcccaggttagagcacagtggtgcgatctcggctcactgcaacctccgcctcgcgggttcaagcagtcctgccacagcctcccgagtagctgggactacaggtatgacccaccatgcctggctaattttttttttaattatttgtatttttagtagagacagggtttcatcatgttggccaggctgctcttgaactcctaacctcaggtgatccacccgcctcggcctcccaaagtgctgtgattataggcttgagccaccacgcctggcctgttagtgagttacttctctgtcttgcctccctttactgtgagttgcctgatggcagaacctgtgtttttattttggtatttcatgagctagctgtttggtcaaatgaataagtgaatgaagcatttcatattcactcacatgaataggtgagtgaatatattttaaaaaacatggatagccaggcatgttggctcacacctataatcccagcactttgggaggccgaggcaggcagatcacaaggtcaggagttcgagaccagcctggccaagatggtgaaagcccgtctttactaaaaatacaaaaattggccggacacggtggcttatgattgtaatcccagcactttgggaggccgaggcgggtggatcatgaggtcaggagtccgagaccagcctggccaacacagtgaaaccccgtctctactaaaaatacaaaaattagctaggcatggtggcaggcacctgtaatcccagctacttgggaagctgaggcagaagaaccgcttgaacccaggaggtggaggttgcagtgagccgagatcacgccactgcactccagcctgggcaacagagctagacattgtctcaaaaaaaaaaaaaaaattagctgggcgtggtagcacgcacctgtaatcccaactactcagaaggctgaggcaggagaatcgcttgaactcaggaggcagaggttatagcaagctgagatcatgccactgcactccagcctggatgacagagcaagactccatcttggaaaaacaaaacaaaacatggatactagatgactccaagtaaaatgtgagagctacctttaagctattcctgggctgtcctttggaaggatacatttgaggatgactccagaaggcaagttgcagggaggcaaatttggctcacactaaggcaggatgatcacaggggcaagtggtggaatggactgctctggtagtagcagggctcccgttgccgaagacgaccaagcagcagctgcagagcccctctccaggttcactgtagaaggcacgtctgtcttgggtcgaggttgcccacaggatgtctgttcactctaaggtgctctggttccttgacccaggttgcagggcgtctccacgtggaagtgatgcgtgttacaggagctgttccagagcgtgtggtggaggatgactcttcggagaattccagtgaaagtgggagccttgaagtcgtagacagcagcggggaaatcattcaccgagtcaaaaagctgacatgtcgggtgagaggacagtgatgggaggctcatataaatgacctttttcatgcaaaaccattttacaaaaaatcttatgagagtttttcatccagggtagtaaaagttggattttgtaacagcagatacagtggtggacagtactttgttttcagaaatatagcacactttcttatgacagttgcatcaaatttcaaaagtgtttatgtatttgacatgcaagaagtgtatgttgcttagtgaattatgtttttctattaaaggttgcatctcagtcattaggaagcttttgcaggaatgtgtgtatttgttgccaagtttatatactatagttacagaactgtggtacagatttcattatcgatacaacccttagtgtcacggtgtcagatataatattttcacatgtcaaatggatgaccgatttgtttcatcgcttactcttaaatttgaggtagctgaaatgaaagaatgtttagtgttcattggagttttatttgtattgtttatctcttcaggtaaaaattaaagaagcaacggggctgcccttaaacctctcaaattttgtcttctgtcaatacacattctgggaccagtgtgagtctacggtggctgccccggtggtggaccccgaggtgccttcaccacagtccaaggatgcccagtacacagtgaccttctcccactgtaaggtacaaatgccattaccaaatgagctgtgtaggaagcagcagaaattggtgcagttcaacaatcagttgtccccacaagcatttgttttaagtataatatgtttattagatgttttaacctcaaaaatgtacctcattacaaatgcaaatagtttagaaatatttaaaataaaatctaaaagatctctaccaacagtcttgttccccaaagatataaaccaccagtgacaggttgctacatatttcattaaactactttctatgctctgcatcttttatatgtgtgtcataacatatgtacatacacccttttacatcatgcacacataagttctttaaaaatgctatgcaaaagtgggatcatattatacatatttcagaatttgcgcatcttaacatgtaagttgctatacatctgattcttatgaatatagcattacattctaatgtatcatatgagtgatatgtttcatatagagtttctcataagtcatatgagaaaatataaaaaaaggaaaggtgaatttgtggtgaatgtggttggatctcctttgagacatcatatactcttcctggctttcacaaggactgctgacaagtcatttctaaaagaccagctccatcctctctatagttttgtttttccttagacttcccttcatagatacacaagatcccttcttttgcaaatcatgcttattctttctggttctacacttagaaaacgaatccatatcaccacctataaaatttcacataggtaagggctgtcaagtttttctttttctgaaaacaaatagcatacatttatctgtattcaacaagtctgttcctcaaaatctttattaatcattttttattgttgttctctgaatattattttaaatattccccatctttctttgaatccacaaagctgcttgtttagaaagatgaaatctgaattttaactgtgtcctggttaacagctgttttaataaatgctagtcccagagcttctgggttcttatgatcttggagttttttggatctcttgtgatcttggagttttttcatcttggagttttttcatcgctaaaatgtatagattgtcatgaagtttctttttcttcttaaattctgggtctatcttcaaataaaatagactaaaaagcagatactatatggttaaataaatatagcacaactgtttctgcaaattagagtcacaagcaatgtcttcacctgagattccacctaaagactaatggaaagaaaattagcttggctcgttgcctacttcgtttttctgggtgatttgccacccatctcagtcagttcagtattcatttcctcacaatcatctgtttgggtttgtttttatttttaaagacgatgtctcactctgttgcccaggctggaatgcagtggcacaatcacggctcactgcagcctcgaactcctgggttcaagtaatcctcctgcctcagcctcctgagtagctgggactacaggtgtgcaccaccacacccggctagtttttactttgtagagacaggatctcattttgttgcccaagctggtcactatctcctggtcactttgtccagctatcctcctgccttggcctcccgaagtgctggcattacagacgtgagtcaccttgccctgtctgtttgtgttttggaaagaggaaatagggtaggaaagcttaagagcaagagcataaagtcatgaagataaccatataaaatttaattctgttattattctcctaagccatggcaaggaacagttcattgagttagtctatgccagctgaaaatcagagtggtcctgtggaactgagaatgaaccaagtgtaagacgatgtagattcagctttgcaactaacaaaccgtatgactttggacaatttgctttcttcattttctttattgatataagaaacgggttgaggccgggcatggtggctcacacctgtaatcccagcactgtgggaggccgaggcaggtggatcacgaggtcaggagatcgagaccatcgtagctaacacggtgaaaccccgtctctactaaaaatacaaaaaaatagccgggcgtggtggcgagtgcctgtagtcccagctactcgggaggctgaggcaggagaatggcgtgaacctgagaggtggagcttgtagtgagcggagatcgcaccactgcactccagcctgggcgacagagcaagactctgtctcaagaaaaaaaaaaagaaagaaacgggttgagttaaattacctcccaattttctttccagatctaacattctgtggttctttatggttttctataaaacagaagagacggatttaaggtcacgatcaggctaatatactctaaaataaatataacagttgaaaggtcaaaaggaaatttcacagactcctttaagcataattcttttgctttcccccacttatcccaggactatgtggtgaatgtaacagaagaatttctggagttcatttcagatggagcactggccattgaagtatggggccaccggtgtgctggaaatggcagctccatctgggaggtcgattctcttcatgctaagacaagaacactgcatgacaggtttgtacttggctgtgagctttaggtacaaggttaagactaggacttgagcagagtctctgaacctactctggcctaggaggctgcttataaaaaaataaaatcatttaaaaaaaaaaaaaaaagaatggccaggtgcggtggctcatgcctgtaatccagcactttgggaggccaaggcagacggatcatgaggtcaggagttcgagaccagcctgaccaacatggtgaaaccacatctctactaaatacaaaaattacccaggtgtggtggcacgcgcctgtaatcccagctactcaggaggctgaggcaggatttatttattttttttttatttataaaaaaataaattatttataaataaataaaacccgggagctggaggtttcagtgagccaagatcgtgccactgcactccagcctgggcaacagagtgagactccgtctccaaaaaaaaagaaaaaaaaggaaagaaaaaaaaaaaaagaatacaggctttgaattctgggactgctgccgttattttggacaagttatttaacttctctgagcctatttcctcgtttgtaaaatgagaatgatgaaagaaattaccaaccaccaaagaaattcaatggggaatgatatgtcctatcaacaaatgagactgaaacaactacatctctatgtggagaaaaatcacccttgttctttacttcacaccatatacaaaaattaatttgagatgaatcatacataaccttaaatacaacaacttaaactataatgcctacagaagaacacaggattttgagatagtcacatattctcaggccacagaaagtgctaaccatggaagaaaaaattgtttaagttggacttaatcaaaattaaaagcatgtgctcatcaaaagaccactatgaaaatgaatacacaagctgcaatctgggggaggactggcagtttcttatcaagttgatcatttgcctcttttatgacccaagaatcccactcataggtatttacccaggataaatgaaaatgcaagtccacaaatagaattgtacacaatgttctttttttttttttttgagatggagtcttgctctgtctcccaggctggagtgtgcagtggtgcgatcttagctcactgcaacctccacctcctgggttcaagtgattctcctgcctcagcctcctgagtagctgggcttacaggcgtgtgctgccatgcccggataatttttttttttttttttgtatttttggtagagacagggtttcaccatgttggccaggctggtctcgaactcctgacctcaggtgatccacccgccttggccttccaaagtgctggaattacaagctcgagccaccacacccagcctatacgatgttcatggcagtgttattcatggtatccccaaattgcaaataacccaaatatccttcagtgagtgaatggggataaattggtattattcacaaataaagtattactctgcattaaaaaagaaaaaaactgtttatatccatatggatgaatctcagaaacattatgctgaatgaaagaagccagacacaagaatacataatgtgtgattccatttatttggagttctagaacaggcaaaactaatctctgagagttacacagttgctacgggaatgtggggattgaatgggaatgcatatgagcaaactttctgaggtgatagggcaggttacactcatatgtgcatttctcaaaactcatcgagctctatactcaagatgtggacatttcagtctacctcagtaaaataaataaaaagaaacaatatgacaggttggttttgagagttaaataaggaagtaacttatacaagataaatggcacagtgcctagcacatagtaagtgctcagtgaatggtggcttattactattactaacagtatccctggacgatgacgctcttgcttgttggaatgtgtttctgcaggtggaatgaagtaacgcgaagaatagaaatgtggatctccatattagaattgaatgagttaggagagtatgctgcagtggaacttcatcaggcaaaagatgtcaacacaggaggcatctttcaacttagacaggtactgagtttgttttgggtttttttttaatgttttctctctgttccactcttacacattgtttctggggattttctaactatttgtatctttattctctaatccttttccccttctttatcccgttccttttcattatcattcctggcacccatactcctccccaccctcttcagggtcattcccgtagagtacaagtcacggtgaaacctgtgcagcattcagggacactgccacttatggttgaagccatcctgtcagtatccatcggctgtgtaactgccaggtccaccaaactccaaagagggctggacagttaccaggtaagacaagcagacttaaaatagtatttaacaaagcttggttaatgcaggtcccagggggacctctttgccaatataacagaactctttgccttaaccgtagatcttcccccagttcacatttccatccattgccttttttctagctttaaaatctgtttgcttagtgtcagttaataataattttatttataaacacacgcatcctaatgctatagtagtcattaactttaggcagattttattttatatctggcccaaaatatgttgtatctttggcattactgcctgacctgatccactttttgggtttttttgtgtgtgttttttttttaaaagatagggttttgctttgttgccaggttggagtacagtggtgtgatcatggctcactgcagccttgacctcctgggctcaaacagtcctcccaccttagcttctgaagtagctgggactacaagcacacatcaccacgcccagctgattcttttattttttgtagagaagggcatgtcattctgttgcccacactggtctcaaattcctggactcaagtgatcctcctgcctcagcctcccaaagtgtagggattacaggcatgagccaccgcacctggccacttttatttatagtgtaaaattattttcatacactgtcataataaaccagttctttgaaagctttacttctttttttgttaaaatttgtccttatgatcatttttgctcattaaatcttcattttctaaacattctcattttaaaaataaaaagatgaaaacctctaagaattgatctaagaattgatcgtattatcagtcagaactattcagtactccatgaaaagaatctctaaaattaggaacttggccaggcgcggttgctcatgcctgtaatcccagcactttgggaggctgaggtgggaggatcacttgagcccaggagttcgagaccagcctgaccaacatggcaaaacgccgtctctactaaaaatacagaaaattagccaggtgtcgtggtgcatgactgtcatctcagctattcaggaggctgaggcatgacagtcatttgaacccaggaggcagaggctgcaagtgagccaagatcataccactgcactccagcctgggtgacagaggaaggctgtctcaaaaaaaataaaattaggatcttgtcccccagtagcctaaaaaaaaatgtgtgtgcttcattgagtccccagtttactaccagatatgaattaggaactgggaagaatcactgttaaatctgcctccctcaccgtcatatgtgatcgggagcactctccctatcgtgccgaggagaaaacatttctctgtggagtctgagtgtaagcccagccaatcttgaggatgttttctcttctatcttagtttccttttggcttcctggctttcaggcaaagtctcttctgaaagctgaaagtcagtgcacagactattgaacttcaaggcagtaatagctttgtcagatgctgcctgccttcttcaagcccaaaattccctctagctcggaacatctgtccacacttcattcagagtatgagtgtaggtgcaaggacagggctgctgtggtttggtaggcttctccaccagacttttccttgtgtgtgtgcagcccgtggagcaggaaatgggattgtaggtattctcatagcagttcagtccttcacttagccatcaacttctacgtggctgcacggtcgaaagagaacactagactgggagtcaggaaacctgggttcttaagtctagttgagctttactaaatggttatcttggctggaaaatttaaactttgagttccccttttctccaaactgatgaagtagacttaataatcctctgaggtccctgtccacaataaaattttgtggcttaataaatctctggtgttcaataaaaacatcggctgtgtgctccaaactgtgacctgcagtataagtatatgggtcatcaactaactaaatgttctcatttgaggaacattccaaggatcaactatttgctgctttttttttttttttttttttgagtctcactctgtcccctaggctggagtgcaatggtgcaatcttggctcactgtaacctctgcctcctgggttcgagcgattctcctgcctcagtctccagagtagctgggattacgggcacctgccaacgcacctgtctaatttttgtatttttagtagagataggggtttcatcatgttggccaggctggccttgaactcctgacctcatgatccacccacctcgacctcccaaagtgctgggattacaggcgtgagccactgcgctcagtacttttttttttttttttttttgagacagagtctctctctctgtcacccaggctggagtgtggtggcacaatctcggctcactgcatcttccatctccctggttcaagtgattctcttgcctcagcctcctgagtagctgggattacaggcccgcaccaccacacccagctaatttttgtatttttagtagagacgggtttcaccatgttggccaggctggtcttgcattcctcacctcaaatgatccgcctgcctggtcctcccaaagtactgggattacacgtgtgagccaccacacccagcaactgttcacattttttaaaaaacagctctacctctgagttaaaactgatttttgtcaaattgtaaactttaaaatattagcctttccccagtgctatgtgctctttaagagcatagtgcttaaaatttggactgtaactattttaaaggctttttttttctttgctgccatgttccaggtcacgtctgttaagtgtttttgttgttgtcacagtgttttagaattattctgatgcaaaaaaaaaaaaaagaattattctcatgcagtagctgaaaccaatgcagaatatgctggttttgcaacaatttcatgtcatgaatgcttaggccaattttcagttaatagaactacctccatagtttaaaaagttatgataaattagagccatttgttcttttacattaataggaagcattagttcaagataaattacttcaggattaggattacatttaataagttagtcatataactgataatggtggttaccaaactaaaaaaaaaaaaaaagcagttcattttgaagtatatatgaaaataattttgactatattcttaaagcactttttagtcataaatctaaattaagggattctaggttctcgtttataaggaaaatttttttctaccaagacccttttgttttcaacgtgattactttgttttgccaaatgtttttgcaaaaattgttactttgtttatttattttacaatgttgccctgtgtttgggacagttatgattctttcaagtgattgttatggtcaatagagagtactgaccaatccttatattccaaatagtatgctgttgcttttatttcaacagtgtagtacagacccttgtatgtatatagcctgaggttgccccagctttcccctgggatgattgcatcagggaagacagctgaggttggagacctcagacatggcttacagttctgacctgccattatctgtgtggtcctaaggttaaatcatttcatcctttaaggcttaaaggatgtttgcctcattgctcaaactgagattgggcaagagaatgttccctgtagttttgccactctgtcttcctaagcctatctcaaatctcagtcaaatagtctaccccaaaatacatatcagctgtctgtatgacagtggtataaggcctggcccaattatgttggttcctatctccagctaagagatttcttatttttattttatgtttttggagacaaggtcttgctctgttgcccaggctgaggtggagtggtgtaatcagagctcactgcagcctccatctcctccgctcaagtgatcctcccactttagtctcccaagtagctgggaatacagttgcacactaccaaatccagctaattttttaaaattttttgtacagatggggtcttgctattgttgcccaggcgggtctcaaacttctagcttcaagagatcctcctgcctcagcctcccaaagtgttgggattacgggcatgagcccagccaagtttttatgtttcagtgactctttatgtgaaaaattctttatagacaagtgaattaaatccattttaccttttttgagattcaatttagtgttttattttgcttatgttaggtaagctgtccattttaatgtgtgttaagcttaaataattattttccctgtatgtggtttgaaaaacaaaatgcttgtcctttgtgtttattttttcctaccagagagatgatgaggatggtgatgatatggatagttatcaggtattgctactgctgtcaatcctgtggcatggggcacagctactgctaattgccagcattcgcaaagcagaggccagggaggaggaaggagggccctagagcgagaatatgcagtttttcacttgcttttgatttgctttatatgtattcaaacacaatattatttctatagatgccttgtcagttcaaaatttataactaaatattgcctttttgctatgccatctcgatttactggcttattgctaagcaagaccattatcactgtattaaaatggatgatctggagactgatttgagtaataataaaactcctgtctcctgcaaattaattaactaattaattaatttaaaaaatggatgatcttaaaatattgcagttatccatccataatcttttagatagactcttatctttcccatgctaaagtgcattctgctccttacatccaagagctaatattgttgtaatatgccattttactttacaagacttttgctgaataggaaaattggagacattttatgcgcataattgtgttttgtttagccagctttcttttctcatttgggtcacacttagttctccataacctatagaatttaaatctcagctttttctggttgggaatctagaaaaaatatatagatgtgcaaattgagattgtacctagtcagcactgactggcctgatatcatggagtgtggggttacgtacaaatagtcaaagcagcaaaccaagatgaagctttctgggttcggttcccagtctttgtacggattctccatacacatcttcaaaggatgttttcccagtgtgccttcctacatgtaaaatgtgggtacagtggctgggcgtggtggctcacgcctgtaatcccagcactttgggaggccgaggcaggtggatcacaaggtcaggagttcaagaccagcctggccaacatggtgaaactccgtctctactaaaaatacaaaaattagctgggcgtggtggcgcgcgcctataatcccagctactcgggaggctgaggcaggagaatcgcttaaacctaggaggcagaggttgcagtgagccgagattgtgccactgcactccagcctgggcgacaagagcgaaactctgtttcggggaaaaaaaaatgtgggtacactgttggtaaagtttcagaggtccaagggctctattcttgatgtaacgtcttaagtcttaaactagaattaggcaagtcaaagagcatttttaatagaattgatggattttctttccctactcataattccacgaagaaaaacctttaagggaaatatcagtatccccttgaatctcagcaatgccattgactaacgtcctgcggctgtttgtgcgcttcctggcacatttttcacagtgcagtccaatggctgcctaggggatttcttaaagcatggctgactgcatgttggagtttgcatgggagatttttgcttagcctcgtggtggttggaagtaaaatgtttgtggcaagtttgaaaagttctctgctgacctactctttgcatttcagaaaatctatgttatcagaccactgaactatggagctatgaaaatgcctgtcattttccattccatttgttgttacttggtttgggctctgttcatgctgtccttctgtttgggatcacaaatcctgcaatgaatagctacgatttaaatatacatacactcattgtaaaaaaaatctgacagctggtatagtttgagcttgtcttgcttttaagtataattatccttctggagatccaggggctctgatttctgggtaacagcatccttgatcaacatgcagtgttactgaggcctctctgctttcttgcatattaatcacacagcaatgttcaacagcttttcctaatgaaaaatttcctagttgatttaaacatcttttaaaaaaagaaagaaagaaatcgttgtctgtgcagtctacaggaaaatattttccctccctgatgttaggaagaagacttaaactgcgtaagggagaggtggtcagatgcactcattaaacgacgagaatacctggatgaacagataaaaaaagtcagcaataaaacaggtatgtgagatcaaactcttttatggggagtagctttttcacttttacacaatggcagtaggtcgttttcttcccctaactggacagtagtatcttatttttgttgttgttgttgttgttgttttaagacagggtctcactctgtcacccaagctggagtgcagtggcaggatcatatctcactgcagcctctaactcctggcctcaagagatcctcctgcctcagcctcctgagtagctgagaccacaggcacaagctaccactcctggctcatttttaaatgttttgtagatggggtctcactttgttgcccaggctggtctcaaactcccggactcaagtgatcctcccacttcagcctcccaaactgctggaattgcaggtgttagccactgcgcccagcctgtttagttttgtgaacttgtaacaattatagacatcagtcaatcatattatacattgttggtttaagaggcctccaaatttgaaagtagtaagttttcataaaactcagaattatctcataaaactgtgacattaaatgtcaaattcaaatttcgttttgatgaacacaaatgtgatcaataccagtatgtcaatacaaggtactttaggcaccaggacctaggacatacagcagctgaagggtcacttctgaaaccaaaccgcttagcaggtcagcacctatccactgttgggccattgccatgcactccgctggttcagggtggcccctacaactctattcactgccactcagctccaagggtgcagtttgcttatgctagcagtggccacttggattctagagtagaaatatgcacttaaaatccttagtctgtcatccagacatcatggtccactcacggtggttggttctgcagcaaagaacatacacatcatgcatgttaatccatttcatgtagaagctagcagaaagtctccctcaggaaaacaccttggctcaacatgtgatgtcgccttgtgtgtgtgctcaggctgctaatgaaaactcacttagactgtacccagggagccccagagttgaattatgaataagaggatttcaaagtatatcagataaaatccctttcatgataagcctcgaggaaaataaaggtgattttacagagtaagatatatggtgggttttttatttttttatttttatttttgagatggagtctccctctgtcgcccaggctggagtgcagtggcatgatcttggcccactgcaacctcctcctcccaggttcaagcaattctcctgcctcagtctcctgagtagctgggactacaaggcgcccaccaccacgcctggctaatttttgtatttttagtggagacagggttttaccatattggtcaggctggttttgaactcctgacctcaggagatctgcccacctcggcctccaaaagtgctggggttacagccgtgagccaccatgcccggcctatggtgttttttaatcctgtctttgtaacatcatgtatagttctataaagcagtgtcacatccgtatttcatttgatccttccagcaagtacatgaagtagatacgacttcttttatccctgtttgacaggttaaggagactcatctgttggataacttccccaaattacagaaccagtaaaataacctcagtctcataattgctgttccaatgctctttctgctatttctggcttgcagttccttaaattggtgttgaagcccctcttagctccctatgcatgctcttgcttgaacttcaaagactcaaatccattttagggacatagtggatggttaaaccacttatagatagcactgagtgaaatctgtttattgtttttgtttgcttgttttttgagacagggtctcttgtctgttgcccaggctttagtacagtaatgtgatgatagctcactgtagccttgaactcccaggctcaagtgatcttcccacctcagctgcctgagtatctgggactacaggcatgcgtaccaccaccctgcccaactatttttttttttttggtagagatggggtctcactatgttgcccaggccgaaatctattccttgtaaactgagaagtcatactttctctcttgttggcattgatctcctcatttttttctgcagagaaaacagaggacgatgtggagcgggaagcccagcttgtggagcagtgggtagggctgactgaggaaaggaatgctgtgctggtgccagccccaggcagtgggattcctggggcacctgccgactggtaaggctgccctcccttctgtgcagacctggggagatggtacaggtcgcctgtggcaagagccatgcaagagactttccaggattgtcacagaaaatgccaaccagctgaactacttagggaatgtccactcatctctaatgcttccatccctttttttccttccccaccgaagccaactttctcccacaggaagcgagagagcattgattacctggccaggaatcacataccactcctctgttcctctgcataagcaacttggacattgttccctgatgcccagaaactcttttatcttggctggaaagtatttgaataggacagaaaatatattagtggagctatttttttggtagtattgtgagaattagagataatgtatataaaataccttatatatgataatactatcttgtatattgtaatgtgtataaaacacctttcatacccattcattaaatcctagctgctgctgcttattctcattctcatttttattataacatatccagggcatttaagagaaatcagattccttttgaacacagaatgtacatgcccagatagtcttttttgaactggcatagaaacattagtgataatacctgcatctctaatgataaagggaaaagtaatcagtttcgtggtctgttttctgaaactagagactctgaatctgcaggcacataattcataacctgatgtttctccctgcagttcctgctgttgtgctggaatcctgtaggtctcttgcggtaattctgccagccacttcttatagacagcctactcaccccaatcttgttctggccctcaaagccctctctagacagtttgtctccttacttcagtctctctcgtgtaaagtgttttcaaacttcagatcatcttgagtgtttgtaacatgtaggcctgggtgtcatccctagttatgttgattcagaagagaaaggaaggacccacgactcttctttttttatttttttaaataagaatttgcatttctaaagggactcttcactttaagaggcctctgaggcggttctgatgcagctgggcaagttgggtttttttgtttgttttttgtttttttgagacagggtctcattctgtttcccaggctggagtaccagtggcacgatcttggtgcgctgcaacctcgatctcccaggttcaagccatcctcccacctcccaagtagctgggaccacaggcctgtgccaccacacccagctagtgtttttttgtttttttttataagacaagatctccctgtgttgcccaggctggtcttgaactccagtcctcaaaccatcttcctgcctttgcctcccaaagtgctgggattacaggcatgagccaccatgcccatccctgggccagtttttgataaaacactgcttggtctcttctgtacacaaccctccctcctttcacacatctttcattctgtcctttgagctttgagcttttgtttacttcctctaggctctgatcctgtcccgttaccaccctaacaacatccccccttccctttacctctcatgggaattatttttagaaaggcttaaaatcatctttgtttcaattaattacatgtaactcatataactggaagttcttttatgtaagtcatataattcccatgatttatgtctacagggaagtcaagaaatatgaaagtatttcattagtggaaactgcatctccaccatggttctctttgcttccacagctctgtggtgttttatcagctaacaagatgtaaaatacatattttgttatgattaaatgttgttattaaatttaggatcccacctcctggaatggaaacccacataccagttctcttcctcgatttgaatggtaagtagacacttaaagtcacagggattattgtatttaactaaggtttgtaatctatccagattcacattattttgatccttaaatcactcttctaatcattcatgtgccaaattgggtgacatttttgttctcattaaacgtatataagcatgatatgtggataatcaaaaaaagagcacatagggtgattgagaactgcatgcacgagcattagcacagttgctctgaaacagtggacatagaaattaccctggaaagtaatcacccctagagattctgagtctttaggcttggcaagggcctatgaatctgcatctctgactagtgcccttaactctcctcaaatagttttgatggcagaagtgatcacactataaccctgccttaggggttgtccttcatattgcaattagatggaacctgggcaagtctagaacaatggtttccaatgtgctttagcagaacaatccttttctaaacgaaatattaactggaaccccatgtgtagaaaacaacggcagagttgctgagtttgcagtgggcaggatcctggtagatcctttggcagggccctagggctcctcaaaacacagcctgaaaacctctgttctagaaggaagcccaaaataatggatggaagacacagggagggtggctttggctcttcatgtgaagaatttcttttttaaagcctagatgttgaatgtatgcctcataagatagtgagttccctgtcataggaggtatataaacaaagactagttggccatttacagagatttgtgaggggcgaaccccatattggataggatgttggaagaagataatcttcatatttctcccaagtgctcagaactttgattctaaattgatttcattgctaaaatctctaatttatagtaagttattaagtaggacaacaaacctaacagtttacaggaggaattgacctcagaaagcagcaaaattctaagatttgttttgttttgttttgttttgttttgttttgagacagagtctcactctgtcacccaggctggagtacagtggcatgatctcagctcactgcaacctccgcctcccgggttcaagcagttttctacctcagcctcccaagtagctgggattacaggcacccacgaccatgcctggccaatttttgtatttttaatagagacggggtttcaccatcttggccaggcttgtcttgcactcctgacctcgtgatccacccagctcggcctcccaaagttctgggattacaggcgtgagccactgcgctcagcctccgaggtgtgtttaatgaatatatttgtacctaggacaacaaagaatatattcattccatcttataggagactcacaaggcaactttttggctcctgttgtatttttaaagaataaaagcagccgggtatgttggctcatgcctgtaatcccagcactttgggaggctgaggcgggtggatcatgaggtcaagagattgagaccatcctggccaacgcggtgaaaccccgtctgtactaaaaatacaaaaattacctgggcatggtggtgcacacctgtagtcccagctgctcgggaggttgaggcaggaaaaccgcttgaacttgggaggcagaggttgcagtgagccaagatcacaccactgcactccagcctgggctacagagcgggactccatctcaataaaaacaaaaaaagaataaaagctgtggggcacgatgagcttatgcctgtaatcccagggcttttggaggaccatgcaggaggactgcttgagttcaggagttggagaccagcctgggcaacaaagatggactccatccctacaaaaaattttacaaattagccaggcatagtggtgtgtacctgtagtactagctactcaggaggctgaggtgggaggatctcttgagcccagaagttcaaggctgcagtgagctatgatcaggccgtgcactcaagcatcagcaacagagcaagaccttgtctcaaaaaaaaaaaaaaaaaaaaaacccaagtacagtggctcacccctgtaatcccagcacattgggaagtcaaggcaggaagattcattgagcctaggagttcaagaccagactggacaacatagtaagacctcatctctattaaacataatgattttttaaaaaagaaaaaaagctgttgtgagtcttggagtctctatttcaactgcagaataaggaatgaaagaaaaaagaaaaatgtgttatgtgtaaacttcaactgtaaaaagcatatatttaaatttttggtgtttgcttaaaaactgactttcccctactgttttttctgtgctcctgatgtggttagcggatgacctcagtgccaatgagcagcttgttggcccccatgcatccggcgtgaactccatcctgcccaaggagcatggcagccagtttttctacctgcccatcataaagcacagtgatgatgaggtaattaacccccaagtttctcttaaaaggcttcagattagcacacaaggcttgtgggcctgctcactaaactgctatggtttgctttggggaaaaagaccggggactttaaaaaatagaacatttgtgttgctgtttaaaaaaggtgaggaaagaaatctatttgattacagtgagttgaatttattttctttctcttgtatgtcctgtaaaactgctacatctgacttttgtcttgtttccatctcctcatcattccccaactcctaggtttcagccacagcctcttgggattcctcggtgcatgattctgttcacttgaatagggtcacaccacagaatgaaaggatttacctaattgtgaaaaccacagttcaactcagccaccctgctgctatggagttagtattacgaaaacgaattgcagccaatatttacaacaaacaggtaataacggggcctgattgtgccattctggctctgagctcaaaagatttttccctctctctatcacaaagcagtgttttttggtgctgtgatgtgcaaaacatgaccatcctggccaagttatagtctgattctcatttatccaaggtagtgggcattaggatagcagaggtcaatgtcatccagtaagggcagtttcaccttgactgattggagaggtgtaatcctaccaggcagtggagctgtgatatttcactgtttgaaaagtagaaaaactgaggctgagagattaagtgccaggtccaagcaagtgagtgacaaaaccaggacaaaaggcagactccaaacaaatccctatcctactgctttgacggatcccatctcagaggtgctgtcagtgaaactgatcctctccagtgttgttctagccatctcaggaaagactgattaagccctggagagatcacaggaaggcagcagatgggagagagaagcaaccacagaaatcctgaacatgctgcagattctgtagtcaaattcccaactaacagctggacgttagtatcccttggggttggagacagggattcttagcttcagttttttctgttatgctgagtattctgcatttcaaaaacatagtaacttgtaatgcttctacaatttgtaaaatacaaaataactggctgggcgcggtggctcacgcctgtagtcccagcactttgagaggccaaggcgggcggatcacgaggtcaggagatcgagaccatcctggctaacacggtgaaaccccgtctctactaaaaatacaaaaaaaaaaagttagccaggtgaggtggcaggcgcctgtagtcccagctactcgggaggctgaggcaagagaatggtgtgaaccccagggggcggagcctgcagtgagccgagatcgcgccactgccctccagcctgggcgacagcgagactccatctcaaaaaaaaaaaaaaaaatacaaaataacttacatttgtcacatagcttaatacagcttttttttttttctactagagtttcacgcagagtttgaagaggagaatatccctgaaaaatatattttattcctgtggtgtaacctatgaaatagtatccaatataccaaaggtaaaatatatgctactttaggccgggcgcagtggctcatgcctgtaatcccagcactttgagaggccgaggcgggtggatcacctgaggttgggagttcgagaccagcctgaccaacatggagaaaccctatctctactaaacatacaaaattagctgggcatggtggcgcatgcctgtaatcccagctactcaggaaggctgaggcaggagaatcgcttgaacctgggaggcagaggttgcagtgagccgagatcgcgccattgcactccagcctgggcaacaagagcgaaactctgtctcaaaaaaaaaaaaaaaatatatatgctactttaaaaaatatcagtatctaaataatggagaatgtgttcattctccagacttctaaaacgttttctcaccacactttggatgaaaacgttgttcacatcaaagtattgtcacttccttcctgtcctcgtaggcaactgaggagatagaggaccgggaaacgctggctctcctggcagcaaggagtgaaaacgaaggcacatcagatggggagacgtacattgagaagtacactcgaggcgtgctgcaggtggaaaacattctgagtcttgaacggctccggcaggcaagtaactgaatatctggaccgaggatgaaagcaccagccttcacccccaatggacagatatgaatttacttaccaaacacctcactaaatctatcagagaaggagcacttgagccatctctattgaaaggactctggcaaaatagtaaccaaaataaaaataatgactaacttttattgaataacccctacttgccaagcactgagcctgagtaatttagatatattatttcatttaatcttcaagataaccccctgaggtaagtactgttgaaatccccattttcaaatgagaaaattgaggctgatagaagttagctaactcacccatggttacacagctaggaagtggtacaaagtcggatgtaaagccaagtagcttgactccaaagcacatatgcttaaacacagacttactatctccctaatttttagacctgagttaacttttgaggtgacgacaggtcattcaagtgaaaataatccactaagtaatgcaactataagataagatatgtcatttcataggagcaatagttgacattattgggggaggtgttgattaataggaggaatgtaattggcatctgtcagaaaaatcttcccttagtggaaatcccacctgaattgctgcatgagtaaaatacaaacagcatcacacttcattgtcattttgcaaatgagatacatagttagaagtacctcttctacattttctctgtccacctgtataaaaatttcacaacataaatgtcttccattctgctgttttcctggttttatttatttatttgtttatttatttttgagacagagtcttgctctgtcgctcaggctggagtgcagtggcacaatctcagctcactgcaacctctgcctcctgggttcaagcaattgtagtgcctcagcctcccagatagctggaaccacaggcacccaccaccatgcccagctaatttttgtattttttagtagaaacagggttttaccatgttggccagctggtctcgaactcctgtctgtgatccacctgcctcagcctcccagagtgctgggattatagacatgaaccaccacaccctgcagttttatttatcttaaaaaaaatatttttgataaattgctaagcaaataataataagtgggtaaaataatatttcagttttataaatgtgtatgtatgtagaactgatgcagtctatatttaaatctataaataaacatatgttacttttataattagaataaaaaataaagtaatggccgggtgcggtggctcacgcctgtaatcctaacactttgggaggccgacgtgggcagattgcctgagctcaggagttcaagaccaacctgggcaacatggtgaaaccccgtctctactaaaatacaaaaaaaaattagccgagtgtggtggcgtgcacctgtagtcccagctactcaggagactgaggcagaattgcttgaacccaggaggcagaggttgcagtgagcagagatcgcatcactacactccagcctgggcaacagagtgagactctgtctctggggaaaaaaaaaaaaagtgttattttcaaattattatgtttacaggccgtcacagtcaaagaagcactttccaccaaagcccggcacattcggaggagcctcagtacaccaaatgttcataatgtaagtgcatcctgccaaggatctgctcctatgtgacatgtcgcagcctctggggtgggggaaggtgggattcacacagtggcagtagagcttatggaactggtgtgggcatcccaaagtgtagcctgcttctctgtaccagggacacacaccaggcagcacagttgtctaagactgagccatttgttcaatcttatgaattcctgttcagcaagttatctccttgaaagaagttccttaagatataaattgagtttagttggttacagatggtggagtcagctatgaatacttgcacccgagtccctggacgctggctgctccagggtcagtttttgtgcccattctagctgccctggtggctctgagtctgccaccatcagtgtgataaggagtcagccactgcatgtaggcactcttggagtccctagttgttcctttgaccattttcgttatttttctcaaccagttaatctagaaaatccaattgacagaaactgatcctagcaggggggacactgtcacagagggataggacagattagtgcatggagcacttctaagcagccacttcccagaagcagctgagtagaagtaaggtctttccaaggaaaaacacaggcttatttgccttcctgttctctagaattgccagaaaattatttaaaacatggtggccacttacaaaaattgtcctacagtgggctacagagcaaatcccagtaattattatcacacagattacttcttctgaccacaatgcatttattagaaatagataagagagactcatatagttgtaaattgaaaaacgcttttcatgaactcatttctcaaagaagaaattatgatggaaattaggatgtatttagaactaaatgagaataaaaatgatacatagatcagtgtttgtgcaatgcagctaaagtggtacctagaaattattagccctaaattccctataattctgtataaagcagaatactagacagtagaaaaaatgagagagtgagggctactattaggaaatatatagctcttatattaaaaagtagagtaaaaaagaattaggtaaacatctagcttaaaaagtaaagaagatcgggcacggtggctcacgcttataatcccagcactttgggaggctgaggtgggcagatcacctgaggttgggagttcaagaccagcctgaccaacatggagaaacccggtctctactaaaaatacaaaattagctgggcatcgtggcaggtgcctgtaatcccagctactcgggtggctgaggcaggagaatcgcttgaacccaggaggagattgcggtgcgccgagattgcgccattgcactccagcctgggcaacaagagtgaaactctgtctcaaaaaaaaagtgaagaaaaactgcttatgaagtaatctaaaaaaaaaaatatttttttcaacctcaatctgatcaagtaaagtcttttggaagccaaggcgagaggattgcttgaggccaggaatttgagaccagcctgggcaacatagcgagacctcataacttgatgttatgccaacaaatgtaaaagcttaaataaaatggaaatgtcctgtaaaaactgaatcaagaagaaatagaaaacctgaatacagctatcaccaaaaagaaggactatactaaaataatgactattactatgctcgttgatgagaattcacagtatcaaaaaattggcatgtccttaagctaatcattctcaacagaattttttgtaagatttgataagctgattctaaaacctgtatggaaaagcagtcaaaatatactcctgtacaacccagagattacatcccttagatatatactctagagattctcataaatatacaggttgtatttagaattaaatgatactaaaaatagtacacatatcaatacttgactagactattgaataagaccatatatagtaagataccacttatgtgaagcataaaatatgcaaaataatgttaactattggttatgagtatatacacatacaattatataaaacttatatgggaatgataaaccccaaattgagagtagtcactactcctggagagggaagaaagaggaggagaagaatgaagactgcaggcttcaactgtgacattctgtttctttatataaaaaaaaccccttatattaaatatataaaccacattgctaaaaccattcttctcttataggtctcttccagccgaccggacctttctggctttgatgaagatgacaaggtatgcacctatgggcatggctaggtttttagtagaatcttagtctggaaagttgtgggatcttggtgtttttaaaatctctgggcctcacctggttgatcctgtcagtttaaaaaaaaagaaaaagaaaaatctctgggcttcccatcttaattgtaagcaaataactctctccacaactccatttccaggttcaaatacttgatgtgatattgctttgcacttctttttttttttttttgagacagagtttcactcttgttacccaggctggagtgcagtggcatgattttggctcactgcaacctccacctcccaggttcaagcgattctcctgcctcagcctcccgagtagctgggattatagtcatttgccaccacacctggctaattttgtatttttagtagagatggagtttcgccatgttggccaggatggtctcgaacttctgacctcaggtgatcgatccgcctcggcctcccaaagtgtttggattacaggcatgagccaccatgcccagacaattgctatgcactttcagtattacattgttacttaccatgataggttccataccaggacagtaccacacataattgaatagatatctgtgtgtttatgggtttaactctaaatgattggagaaggtgttacatccaccatagcataatcaaaattatttcaatgggtaaaagaggggatttaaaattaaggacagattgcaacatgatcttattcaacaaatatttcttgaatacatattatatatgagttactatgctagagactagatgatccaaaaggtataagcacagatttatgtccttaagaagtttaaaatttagtcttcagaggcaatcaactcctgataagttgacataagattaagtaagctcgtatgatatgccagcgttttctctgttttgtataccaatactttatgcctctttgaaacttttaaatctcaaatataggtagagtaaccacactgccaaatttgccttggacagtctcagctgtgccttctacccaggcagaattactaatggaacagttgtcctttgagagtgtttcagtttggtcattaaattatcaagtcactctgggtatatgccacattgctcaaagtagctacctctggggaggaaggaagatgaatgggaccaaaagatcacactacatttgtaataattttattaaacttgagcaaatataataaaatattaacatgtattcactccgggtataccttggatatgacagtattttttacgatattcagccctttctgtatatttgaaataaatcataataaaaataaagaagagcatatgctgccattaaaaaaaaacagaagaaactccaacctgggctttatttcttattttggagtgattcaattacagttaacccatatttttaccttgtagggttggccagagaaccagttggacatgtctgactatagctccagttaccaagatgtagcatgttatggaactttacccagggattctcctcgaaggaataaagaaggtagtggtgagattattttgcagtgatatttctttgtaattacttagaaaaagtatgaaaaaatgtctttcattaatggcatataataagatatgaagctgatattctagttaactagatgatacaaaactgttattgaatgtaacatataacattcacttatttgatttatttttgttttgtatccaacatatcacccaaataatcatagactttttgtatattactttagaacttctgaatcattttttgtcatcatttcctgactttcaagtccagttttgagacacatacaaatcctattattttctaccagaatatccagctctgtcatatttgtgtactcaaaggaatttttaaaagaacatgactttgattcataaagcagttttcaaaaacgatacccaaaatgagtttgattcatggtgacattattacctaaattatacagtctaccagtgccttaatgggaacagtattctttggccatatatatcggttctgttaccttataccttatattagtaggtaaaatataaggtatattcgccattatactaacaaattggaaagggaggaaagaggccaaaaaggtaagaaatgatacaagcaaggaagaagaattgtcctcccttagtcatatatagcagggtggcctgagggggaaaaaaagaggctcgcaagaaaatttacacagtattaattcattgaatatttattgagcctctactttctgtcttataactatggaaataagatacacagaaaatgagatgttaaatgataaggtgccaaaatgaacatgcagataataagggctgtgagaattcagaggaatggaaaatcagcgtgagctgaaattggtctggttagtggtgcttaagctggatcttgaaaagagtgtagaaatttgctatctcactttgttcacacagactagcactttagtaactctttgtgacatcacagatttatgtctattcttgcctacatctgttccatggttttttgggggtttttttgtttgttgtttgttgtttgtggggtttttttgttttgtttttagacagggtctccctctctctctcttgcccgggctggagtgcagtggcaccattataactcactgcagcctcaacccctggggctcaagcgatcttctcgcctcagcctcctgagtagcaagtacaacaagtagacaccaccatgcctggctatctgtttattttttttttcacagactggtgtccctatgttgcacagggtgggcatacatctgttttaatgcttagccaaatattagcctatgaatttcattgttctcccagatattcccatggctgggtcattgtctcagttcctatgttttgcttaaagtgttcagcatctgtaacctcataacttctcatcttccctaggttgtacatcagagactcctcatgccttaaccgtcagcccttttaaagcattctctcctcagccaccaaagtttttcaagcccctaatgcctgtaaaagaggagcataagaaaaggatagccctggaagcaaggcctcttctaagccaggaggtaaatgcttgacttgtctgtactatgcagaatagagcagagttgtgtcacctgtgaagcagcagtgtgcattaacaagctgagtgctgcatgtggacatgcacggtcatcactccatggttcccgttctcgaattcctctttctcaagcatgcagagtcatggtagaatctcttgtttgttgttgctgctgtggttttatttctttgtgtttatggcttttcaaagtatttttttatgtttcaagtgagaaagatgttttctaggtgttttgaaaagattaaaggccttttttaaaattatttttcttttttgtctttttggggatttctgattttgttttttatagagatagggtcttgctgtgttgcccaggctggtctgaaactcctggcctcaagtgattcttttgccccagcctcccaaggcactgggattgcaggcatgagccgttgtacctggtcaaaaggctgttttttaaataagactaattatgctttttgccacagaatctgtttattcctgtcatatctctccagtagtttaactctggcctgcagaattggctgctgcattactcacatgtaataagagtgttagcattgcttttctaacttgcatgtacttaatatgtattttggccgttgtcgtctttgtgtgtgatgcatctgtgtgtcttaacctttgcagagcatgcctccacctcaggcacataaccctggctgcattgtaccctcaggaagcaatggcagcagcatgccagtagaacacaatagcaaacgtgagaagaagattgtaagttccggaaccatttctgtcatattgcctggtggtgggtttaaggccctttcacagacaatcatccaaatgctagaagaaattaagacatgtattgggtctttgtcttaaagaaaataaaaatgtgaccattggtaatgatattttgcatggatgtggccatgacctacaattttatcttatttatttatttattttttgcttaagtttgcttagaaaaagggagaaaggcacttttattgcttctggcctttataaaaagtgtaacaaagagatctttttaataccaaaatctttctaatgtgcctatacatattgcctagattctgaagttaatctacctagaggaagtgcacttacttggagtaagtaatcatgcatttaatgcatttagctgtggatatgtttggaagcttttttatgttgcctgatgctattgccaagataattctgtagttagagctgcactacaatctatcataatcacccttcatcgtctcactgtctagggtagcctttgttaattagctggcaaaatatattccaataccttggtgccagccttgcattcaggatggcttatatatattttgccacaggtaggctgaaactctacccacaaaacctcattccttagcacttggttttaaaattattaatttgagatacagttttaaaaacactgcataccaggcaccttaggttataaattatacctcaatttacaaaaaaaaaaaaaaaaaaaaaaatcctgtttattctcaagcctggaaagaattctctaaatttttgtctcagctttcactctcctgtggcttcctaggctttgaaaaagtaaaaccagctcagggagacaggagactgcttgatgtttatgtcgcatctcatcgtctctattgggaagagtgtagggagtctcattttccagcgacaccatgtcagacccattcccaattccctcattagtgtgggatcctttaacagttcctaacgcacactgtgtgagaactaactaactgcagcttaatccagatatgcagttggccacccacctgcgtgcttggggtgcgggtggatcttcagaaacaaccttctcattcctaatgtgaagaaagaagaaaagcaccattttccctctatttcttcatccctcttcccctcctctgcctttggtttctccttgtccctctatcccaaagccctgtcctagttcctgatggagaagaatccgcacattaatagctgctccttcatctctccaaatcttactgagctgttctctcacttacctgaccaccctctgctcaattaataagggctgcagtgtgggctaaaaaggccaaatgactagttttttcccctgccaattctctggctctgtgtctgattggatctgtttattggcatgacacttatcactggtgcacagccactcaatttaaacctattgcaacgatacattttggtacaacaccatcaagacactgctggatgacccttctggggtgttcagcagatagtttcacagttcacagagctaggctcgtgttttcttcactttctctttaatattttaaaataaaacccatctcggggctttcagctagcagagagaaggatggaaccagattctcttgacccaggaagtctcaagcagcagttagactctgtgactgaatgcaccatggagtacagtaagaaggacttgatggtgttattgttcttgctggagtcttacttgaaaaagctgtctctactctccataggaaactggcttgctgagcactctgcacctaagaggcaattgggctctttaattcattccagacagcagtttttcaaggtgttttggtagagattaagtgcattatttgtttgacctgaggttcttgtttctctttgggaaactttaattttgttttttctcttataaatgggtacagactgttttcttcctttgtgactaattcacgttcttttctcttccactcttgaacaatcagagtgactcagttcagatgatcaagagagtttgaaatcattcttgagaagaacagcatcaagacattgttcctgttaatgtttaacccacctaattaccatagtaacttctgtaatttcacataaaatatagtaaacatggctatgcttgattctttaagcaatattttgttgtttgatcaatttgggaagacatacagatgtacttcatgtctcatgactaagacagaagcaacaatatgcctttggagtctgtctttttaagtcataaagcatagagaatagcagaaagaaagtcagtgatttttcccagtatccacacgacctttccgttaggtcttgcatagacagcatgtggtttattcctctggtttacagaagaagaagcaaagggttagaattgttgagcaacttgctcaaggtctcacagttaatgatagcataagaccaaagagccccattcctcagcataattaaggggactccagtgactccaggtgctttcaaatatagtgcaattccagtatgccctgcagctgctcttcagataaagggctcactcctcagtaccatggacagaagtactggagcccttggctggtgcagttctgcaaacagagatctctggtgaacagcacgacatgattataataggagtggaaattgcattaatgaaggaaactccttacaaagagtcactgctttaatgtggatttcagtccctttttaaaatcaaggtgttttctgtataggtaaatatcagctgcataagttaaatttgcaaaactcagatgaagactgtagctatagagaagcttgagaacttgactccatgtgccacttcagatagggttttaattatctttttccttaagacattgtaggaaggtgcttagtttattcttctttaagctatgatgagaaatgagatttctggtataaaaaatctaaaccaaactccctcaaaaatatgagtttaagccaattaaatcctcccttaattggcaataactcaataaacattcaatctccttttaagtattggaaaatgtttaatctctactaagttttcctttttctggaataagctgtccctactgttttagtctttccctctgggcttttgggttattttccccactgtgaactgctccctatttgaacttaatctcttggggctttgtagattcttagttttattaatgtcattctaatcctttaggaataatttattatctttgataaatttacaactatttctactcagtgaattcatgattacatatttcattcagcaaaattgtattttaggataacaggcctttccttggtctcgagaagaaataacttcaagcatataaaggactccaaattactaattctcatttttaaatttgattttccttgaagtaaataacttttcagtacttaattatagtaaatagtaatttagtaattaattgcatcaggtatgcttggacttggagaattgtgtttgccaacttaaatcaaaaggaaatagaagagatacaaacacttgaaatttaattttgtgccgggcatggtggctcacacctgtaatcccagcactttggaagcccgagacgggcagatcgcctgaggtcaggagttcgagaccagcctggccaacatggtgaaatcctgtctctactaaaaatacaaaaattagccgggcatggtggcggacacctgtaatcccagctacttgggaggctgaagcaggagaatcacttgaactcgggaggcagaggttgcagtgatccaagatcgcgccattgcactccagcctggacgacaagagtgagacttcgtctcaaaaaaaaaaaaaaaattaattttgagtctaaacatgacaagtagagaatctagaaaatataggcaaaggctactggttcagacaattctgttcaatctttgttccttctccaacattctgcccaaccctgggaaagaatgctccaccccacttttttgataatgctacttaatttagaatgcagataaagatgagaagagattagtgttgccaaaaattttgttttgccaatttcaggaactttatcactgatatttgatattcacctttgattaacagctaaagaattaggatcaccaattcctttacacatttattttcagtcacatttttacaactaagttataaaaactaaattattttaaaagctgagaagcatttaagagagtattaaactttttttgaggtatatagaatcttgagatgcaaaagaaaatattactattaatctaaacagatgaaatttatgttcatttgtgaacaagtatttgccatgccttgaagataaatcccccctccccacctcgattaaaaagcaaatttatgttatgggccaggtacagtgattcacacttgtaatcccagctactcaggaggcagagattggaggattgcttgagcccaggagtttgaggctgcagtgagctacagttgcatcactgcacaccaacctgagtgacagagcaggacccctgtctgtaaaaaaataaataaataaaaataaataaatcctagccgggcacggtgtctcatgcctgtaatcgcagcactttgggaggctgagacgggcagatcacctgaggtcggcagtttgagacaagcctgaccaacatggagaaaccctgtctctataaaaatacaaaattagcctggcatgctggcgcatgcctgtaatcccagctactcgggaggctgacgcaggagaattgcttgaacctgggagatggaggttgcggtgagccgagatcacaccattgcactccagcctgggcaacaagagtgaaactccatctcaaaataaataaataaataaataaataaataaatcttaaaaataaaataagtaaattaataaaatgcaaacttaatgagtaaggctgatgctttggttccaggtctttacatgcacctagtagttctaattgtacagatgctttaaaccagatgaccaatgaaagaaagctaactgtttttgaggtgtctaagtttacctgtgaatgaaattcttatccatccatgcagcatccaggattgttctaagagcaaggacgcaaagttgtaattctctgagggagggaccatgccttcttgtgctcaccattgctatttccaagtccttaggacaatggctgccatgtagtggatgttcagtgtgtatttgttgaatgaaagacatattttaaaaggaatatttgcgatttcattaggtgcttctgagattaattagaaatggctagagagtttatcacttattttatttggacttaaaatacccacattttttctaccaaatataaaagaatcattcatttggagagagactggggagttggtgacacccacttttgcatgtatttaccaatttttgtgaacaggggcttgaaaactgttttacaaaggagattttcatttaaatttcactatgccttcttcaccttctagccaaaccctctactcatacttctcaaaaatcctagaagaccgtaattgtcagattgttagtattttatagccttacgatatgtagcataatataagaatgagtgttgaaattgtgttttttgcccttttgcagttgggttctttgttttactctcttttcccccataaaatagctgagaaactttttaaaaattaccttaactgcctgcactttgcttcccaaggtgaagattctaaagacaaaaggagtggctcttctctgcttctgcctgtttctctgctcatttaatgagaaaagagaaaacatcacaactaaaagctaattttgaataactaacaaaatgtccactgcacttcagttccattctttctcttaaaccagggaaggaatgatttctaattagcactgagtgagcctaaaagaactaaatccccttcatattagatgataaggggtttatattcacaggtctctgagaatactgatacacctatatctacaataggtgacaagatctggccaaatttggaaagacaaaaagaaaacactgaacaccatgtgaatgtgaatgcctttaacagccaagtatttaaaacttgtctcaacagtacagttgctacaaggagctaatgactgacttttgcttcacttctataggactctgaggaggaagaaaatgagctggaagctattaacaggaagctaataagttcacagccttatgtacctgtggagtttgctgacttcagtgtttacaatgccagcttggagaacagggaatggttttcctctaaagtagatctgtcaaactcacgggtcttggagaaagaagtgtcccgtagccctaccaccagcagtattaccagtggctacttttcccacagtgcctccaatgccaccctgtctgacatggtggtcccttctagtgacagctcagaccagctggccattcagacgaaggatgcagactccaccgagcactccacaccatcgcttgtgcatgatttcaggccgtcctcaaacaaagagttgacagaagtcgaaaaaggcttggtaaaggacaagataattgtggtgccactcaaggaaaacagtgccttagccaaagggagcccatcatcccagagcatccctgagaaaaactccaaatcactgtgcaggactggctcatgttcagaactagatgcctgccccagcaaaattagccagccagccaggggattctgccccagggaggtgacggtagaacacaccaccaacatccttgaagaccattctttcacagaatttatgggagtgtcagagggaaaagattttgatggtttgacagattcttctgctggagagctttccagtaggaggagtctaccaaataaaacaggcggcaagactgtctccgatgggctccaccaccccagccagctgcattccaagttagagaatgaccaggtaataattccagaggcagccttttgggttctgtgctgtcaatgagtatgtctaactgtatgtcaaccccagaggcccttcaccgcaacaacttggtaggaaagattcatccagttgtttgtgacagcaaagatgagcccacagagaagcaggctcacttcctgcacagctgtctctgtcggagagcaagtctgttttgggaactagaacgcaattgtgaaattataagaccagtggatttttttacctggcacatgggttggtgttgaatgaagtgttcagatggataaggatcaatctcatattcattccctgggatgtttagttaccagttttcccaaagtgttctggtagcatctaccatatttcatcaaatctgtgattcctttgattattatatgaaccattattttatgtatcattaagaaaaaatactgccaattaaactctgtcatatcaacagttgtaagacaccccaatttcagagatggtaaagtgtggagagaaaaacatatatatcatagaattggaaatagacagtcgtttggtgcccgtaggtgaaaaagtgctttggggcggtataggcaaattccagcagcagttgaagtttggactttggaagtaactcagtttataatactggttaattttcttttttctttttttttttttttttttttgagatggagtgtggctctcactctgtcacccaggctgcagtgcagtgacacgatcttggctcattgcagcctccacctccctggctcacgtgatcctcctgcctcagcctcccgtgtagctgggactacaggcacgtgccagcacatctggctaatttttttatattttcaccatgttggccaggctggtctcaaacttctgacctcaggtgatccatcccccttggcctcccaaagtgttgggattataggcatgagccactgtgcctgactaatattggttaattttcatacgggaacaaaatgagtttttgccactattactaaggaaaatcacaaattacataaataagagatgttctgcttctgagcattctgctctgaagtaccaccatttattcccattcacattcatttgtttggtcccccaacttgctgtaaaaggcatgggagagtcatggcttagcaaaataaagaactgacagagctagaaagaggcttggtaaaagtaaaataatcatgctgctactctatccctttgttttgcgagcaagttactccattgatgtggcttttgcccctgcttttcataacagcccttaaaatttcaatgtatggtcatttatacagcatactcattactgaactgccaaaacctaaacagtcatctctgacaagaaaaagacttccttccccgacataagaataatgatagagtcactcaccaccattcttgcaagcaatacatgcatttgtttaggtcttcaactttctttacctggattaaagcagaagctacacagctggtatacatcagcttttcaacccttgttcgtcaagaaggccagtgtcaaagactctttaattctttactgtaagattaggtttgcttctcaaacctaaaggtgctacaaactctaggggcaaggagggtgtggcaggcctcttaaaaattcatattcatggccgagtatggtggctcatgcctgtaatcccagcattttggaaggccgaggcaggtggattgccagatgtcaggagttcgagaccagcctggctaaatggtgaaaccccatctctactaaaaatacaaaaattagccggatatggtggcacatgcttgtagtcccagctactcgggaggctgaggcaggagaatcacctgaacccaggaggcggaggttgcagtgagccaagatcgcaccactgcactccagcctgggcaacagagcaagactccgtctcaaaaaaaaaaaaaaaaattcaaattcacctgggcttagtggcttgcacctgtagttccagctattctggaggctgaggcgggaagatcacttgagcccaagagctcaagaccagtctggacaacagagcaagatcctatctctgtttaaataattttaaaaattaaaatttttaaaaaattcaaattcccaggagtcactgccatccagccctaagattttgctttatacagtgtgcagcaggggaaataaggtattcacaaacccttccttcctccccatcccctcgcatccccatagagtaataggagacaggttatctgagggccatactgtgggaagcactgcccatagaagagggaagaggagcaacaacccccttcttttttcattgcctagattatttagaacccaacaggaaaaggtaaggattggaaagtttccagaatagtgcgttcctcccaaagatcatggtttaaagtgaaatttacaaacatgttatatcaagatgatgggattatggagatttttctcctttaaagagtttttagcggagcgcagtggctcacacctgtaatcccaacactttgggaggctgaggcgggcggatcacctgaggtcacaagtttgagaccagcctgaccaacatggagaaaccctgtctctactgaaaacacaaaattagccggcagtggtggcacatgactataatcccagctactcgggaggctgaggcaggagaatcgctggaacccgggaggtgaaagttgcagtgagctgagattgtgccattgcattccagcctgggcaacaggagctaaactcttgtctcaaaaaaaaaaaattttggcggccaggcatagtggctcacgcccgtagtcctagcactttggggagaccagagcaggaagatcgcatgaacccaggagtttgacaccatcgtgggcaacataacgagactctgtctctacaaaaatttaaatgtttttttatttaatgtatctgctacattggttttaataagttgttttgacagtttaaaattttttctgagaaccataagtttgactttgttcaaacccctgaaatgacttagactgcacatccagaagtcactttttttccttaatttttactttggttgttgctgtcattacttttccttgaaacatcacctcagggcttttacaatgtggattccagcactggattccataataaaaccaatcctgtgggtcccttcaggaagagcccctttcttgtgatgggtgtggactgggctgagagtaggtgctgtgggtggggtggggaggtggggatgagaagcatgaactcaccagcctctgcattccagggaggcacaacctcacggtgagagcagcaagcacccctcctcaggccacagcttggcgtctttgttcgcctggtcaccttgggcaagcaccagccccatctctaaaacatgctgccgcctggctggacctcagaccagaagctggagaatccacaccgtgcacttcctgggccacctcctttcccctccccagtgggagaagcggcactttgtcacttgggtgaatcaacagcctctgctttttccagaaagcaagagaactgaaaatcctggattaactaagtgacagtatttttttttgcacttactacacacctccactgtatagaaacctctacagattccaacagactttattcttgtacaattttaatcagttcttactgtagaatctggagtcaatgctctaatctgttttttataaataatatatattatgtatatgaaatgtgtatctatagtatgtctggagacagacaaggctgcacactaaaatgcagataaaggtgatttgtagaaaatcataaggtactggacttcgttacaaagcaacttgggcgatctcttatacatgagcagatgaaaaatattttattgcctaagaatgagcttgcaaatccctctttgcagaaaaggttatagaatgctgttctttataaccaaagaacttacataagacaacatttttgctgtccactcttttgtgtgaacatgtatgtttgactgcaagtttggtgccataattcccttggctaccaagccacgtgctgccattctctgtcctttgtttcataagcacactgagaaatctcacagctatattctttggtcttccacctgcccctccacctgctgacttgacattgtattataactgttgacaatgactggggtcctgactccacagttgcctggaccgtggctcagcccagctgggcaggtggaatgaagagagcagtattactgtaagaaaacataaggacagccaggagtagtggtggggtgggtggggtgggaggtgttgatttttgtgtgtttctgtgtgtgtggttttgttttggattggtaggtttcactgtggcgtggttttgctgttgttattttgcttgattctggaaaatgctgaggagatggactgagctatgaagttcaatggttcaccctttaccatgtttgcaggagatgatcgaatacagatgaccctgctgtcgtgtcttcatttgtaaaattctcctacaaatggagacattgaaggattatgtgtatggaaatttttacaaaattcctttctgtacctattctgtagatgcctgtataatcggtctggatgtacagctataaatgtgttgtgagagcaagagagagagaatgggtagagcctgctgtaccttttttcttttaaattcttcgagttggtaaatgagtaagatattggaaaccttaatgaaaagctgctgttcatgatttgtgtgtatagtgagctgactgtagtattttactattgtctgttaaaaaaagaaaaactgtaatttatatcccctttgaactttattgtgtttaattggtacacatttctgtgtgtgtgtgtgtgtatgtgttttagaatacaaactgtgtaattcagattttaaaacactaatcgtttgtctttaataaccctgcctttagtttcaaatctaacttaccatatttctatgtgtgcatgtctctgcagtgttaaaaataataatatcagcatttattaggggtcaactgtgtattaggcactgttctaaacatttgatattcattatctcatttaatcctcacagcaacagacccataggtactgtggtcattaagtgtttgacaagtagaaaactgaggcagagaagttactgatggagctgtagcaaagccaggatgcaggccacacttcgcttgtcagtctctgtgttcagcctggtgacatgtcatggacagacaggccttttgaaaactaggcaccttcagaggacagaagggtgtggtgagtgtcacaagttccagacagaccaatcccatcgtggtggaggggggctatctggagcaggtaggacatggtgtgttatacctgttcacgatgcttaaatctttacagcaagcagcagtaccctgccacctgtgaaatagtggctaaaagtagcttattataaaaatcttatttaaaaacaattattacagcatcttttcagaaaaatctcagctgttcacaataccctttctgaagttacaaagaattagatctagcctgttctggacagaagggtgccctgtatagagttccatgggaaaggagagaagggacccaaaaaaatcccaaaacttatttgaattttagagaatgggtttgggaagtggaaagcagctatttaatatttaaataaaagatgacaactaaacgtatagttcaagagaaaatgaacaaatcatcattcctcttgctagtatgagaccagtggtattcaggtcagtgacattgtcatctgtcattatgactaagaacaaactgggtttagttcatattttattggagagttagaggcatgtgtttaacagttatttccaagatacagtagtgccagtgtcagcacatttgttgatagtttttggacacacattttatcataacaaaaatataaccttgtgtttctatggcaccgacttatggggagaatagctgtttataaaaatacctttggggctacggctcgaactgcgtccgctagcacaggagtgggagtcatggggaccagctgcagcattctcattgtgtcctcctggggagaggaaagggtcatttggagctgccagtttcccttcctgggggcctttgggggtttggtgagaactggaaagaatttgctcaaagggaaaccagaaaagaagcagctcctggctgggcgacgtggctcacgcctgtaatcccagcactttgggaggccgaggtgggcggatcacgaggtcaggagatcgagaccatcctggctaacacggtgaaaccgcgtctctactaaaaatacaaaaaaattagccgggcttgatggcggcgcctgtagtcccagctactcgggaggctgaggcaggagaatcgcgtgaacccaggaggtggagcttgcagtgagccgagatcacgccactgcactccagtctgggcgacagagcaagactccatctcaaaaaaaaaaaaaaaaaaaaaaaaagaagcagctccttacctaaaaagttcattttgcctcggttgtgagttctttcattaagaatagataaattctggccgggcgcagtgactcacgtctgtaatcccagcgctttgggaggccaaggcaggtggatcacctgaggtcaggagttcgggaccagcctggccaacatggtgaaatcccatctctgctaaaaatacaaaacttacccgggcatggtggtgcacgcctatagtcccagctgctcaggaggctgaggcaggagaatcattcaaacccgggaggtggaggttgcagtgagccgagatcacgccactgcactccagcctgggcaacagagtgagactctatctcaaaaaaaaaaaaaaaaaaaaaaaaaaaatatatatatatatatataatttccattatgccacatgattcaaaaccaaagaatgtagagcctgaaaaaaaccaacagttgggagtagcttccttgggaataatgccgtctgctagaccagcttttctaggcactacgttcctttttttttttttttttttttttttttggagacaaagtcttactctcgtgtaggctggagtgcagcagcgcaatctcagcctcactgcaacttctgcccccagggttcaagcaattctcctgcctcagcctccctagtagctgggattacaggtgcccgccaccacacccagctaatttttgtattttcagtagagacagggtttcaccatgttggccaggctggtctcgatctcctgacctcaggtgatccacccaccttggcctcccaaagtgctgggattacaggcatgagccaccacgcctggccgacactacgttctttaaggaacaaggctacgatccatttaaagaagatttgtaacatctaataggatacaaaggaaatcatcgctaggtgaccatgaagattcttttttttttttttgaggcggagtctcactctgtcgcccaggctggagtgcagtggccggtctcggctcactgcaagctctgcctcccgggttcaagccattctcctgcctcagcctcctgagtagctgggactacaggcgcccaccaccatgcccagctaatttttgtattttttagtagagacaaggtttcaccatgttagccaggatggtctcgatctcctgacctcgtgatctgcccgccttggcctcccaaagtgctgggattacaggcgtgagccactgcgcccggcctgaagattctttgatttttttttaaaaaaggcaaaaataaggtctggttagagaatgaaaaatatctacatctcagaacaactctatttaatctaaaaagctccctacaattgccagcctatttgcagtctcttaatatgcccactaccctttcagccagtacatgagaaaatatttttggtcccacaggatatagaagataagatttttttaatttttttttggaatctgtcactgaattatatttcagatgcagacactgtggtatttccgtgtttgtgatatttactgtgcagtttgtcgttaacaacttgcatggagtagggcgccatagaatttgccttagtgtttcagttcaaatagagatcctaattcaaatgtcataactcaaattcaaacacagtatgcttgttgtagaatttatcaggtttgctgatgattccttttttattaaaatttttgcggggataatatattgtaacagtctttgcagctacagagaacaggacaggccatcagggtatatttcccaagtatctgaccgaaaacctaagcaagagaagtgagacaaaccatctaatctgtatcctcccactaacaggctgcgtcattttggatttccgaggtccgtgtccttctaaataaaatgaggagatgagacaagagcagcggttctcaaagtgtagttggagagggggcggtcctcagactttcaatgatagccaaggtcaaagctctttttataatactaatacatcatttgtctttttcactctgtttctttcatgagtatggacaggagttttccagaggctacctcacgtgtgatattttaacagactaaatgcacagcagctttgggaatccagctttcatctattaagtcagacattagatttacaaaaatgtaaaataatgccactcttctcactaaaaaaaataaaaaataaaaagcctgtagggttaagtaaggacaagatactatcttctactaaattatgctgccccagccaataattattttttaaattacaatattttaaaagctttagaataatgttgaaaaaaagacagctaattacatgattatgccttattttaaaagtaacgctttctggtcatgtaattaaaaagtattgaaagaaaatgtaattgaggctgggctcagtggctcatgcctataatcccagcattttgggaggcccaggcaggcaaatcacctgaggtcaggagttcgagaccagcctgaccaacatagtgaaaccccatctctactaaagatacaacaattagctgggcatggtgacacagccctgtaatcccaactattcaggaggctgaggcaggagaattgcttgaacccaggaggcagaggttgcagtgagctgagattgcgccattgcactccagcctgggtgacagagtgagactacgtctcaaaaaataaacaataaaagtataaaaaattagctgggcatggtcgtgggcgcctgtaatcccagctgctcgggaggctgaggcaggagaatcacttgaacccaggagctggaggttgcagtgagctgagaccacaccattgcactccagcctgggtgacgaagcaagacttcatctcaaaaaaaaaaaaaaaaaaaaatgtaattgagtaagagttcttgctctccttttcttctccaagggctaaaaagaaaaagtatgcgtgtttgtgtgtatgcataaaataaaaaaaaatatgtaaagatgtcagccagagttacagttatcagttacctgaaggctcaactgagactgggagaatccacttttagagtggatctacttcctcgctctgtagaccccctccatagtgcttgaatgtccccacaatgtggcagttggcatccccagagcaagtggtccaagacagcaaacagaagccacagtgcctcttttatgacctggtctcaagtcacacttcacttccaccataatccgttcatcagcagtgaggtactaagtccagcccccactgaaagggaggggaactaggctcttcattttgtgaagaagactgtcaaaggatttgtagacatattttaaaaccaccataactattacgaagttatatacctgaagccatggggcaaagcaaagctaactgaaacctctgagtgaattgggaatccaactcctttattcataaagagcagagtcaaaaggaaaggcacatcccatggaagacaaaggagatattaataaagaaaaaagtcaaaatactaggattatctgaatgtgtgacttatagtcagtaatcaaactgtactgatattcctggtggaggcaaatgcactccgttgctcaggctgaagtgcagtggtgtgatcagtctcactgcagcctcagcctcctgggttcaagtgatcctcctgcctcagcctctttagcagctagaaccacaggcgcaggccaccacaaccagctaattttctcattttttgtaaagacgtagtcttgccatctcaggacctcttgagctctcaggagtctctgacgttgaattcctgagctcaaagagatcctcccgccctggcttcccaaaatgctaggattacaggcatgagccaccacatctggcctgcctctattttttgttggatttttctcatttgattctctgcggatctgcttcattagagacacaagcataccaatatattttatggctttggtcaaaataggaaattcagaca

SEQ ID NO: 1630 - DNA, 5406 bp, Homo sapiens
gcggccgcgctcgaggggcgcgcggctgcagcggcggcggcgccgcgcgtgaggggccgcctaaggccgagcgggcgcggcgagcggccgggcgagcgcagccaacatgtcggataccaaggtaaaagttgccgtccgggtccggcccatgaaccgacgagaactggaactgaacaccaagtgcgtggtggagatggaagggaatcaaacggtcctgcaccctcctccttctaacaccaaacagggagaaaggtaaagcgggtatttgcctttgattattgcttttggtccatggatgaatctaacactacaaaatacgctggtcaagaagtggttttcaagtgccttggggaaggaattcttgaaaaagcctttcaggggtataatgcgtgtatttttgcatatggacagacaggttcgggaaaatccttttccatgatgggccatgctgagcagctgggccttattccaaggctctgctgtgctttatttaaaaggatctctttggagcaaaatgagtcacagacctttaaagttgaagtgtcctatatggaaatttataatgagaaagttcgggatcttttagaccccaaagggagtagacagtctcttaaagttcgagaacataaagttttgggaccatatgtagatggtttatctcaactagctgtcactagttttgaggatattgagtcattgatgtctgagggaaataagtctcgaacggtagctgctaccaacatgaacgaagaaagcagccgctcccatgctgtgttcaacatcataatcacacagacactttatgacctgcagtctgggaattccggggagaaagtcagtaaggtcagcttggtagacctggcgggtagcgaaagagtatctaaaacaggagctgcaggagagcgactgaaagaaggcagcaacattaacaaatcgcttacaaccttggggttggttatatcatcactggctgaccaggcagctggcaagggtaaaagcaaatttgtgccttatcgagattcagtcctcacttggctgcttaaggacaacttggggggcaacagccaaacctctatgatagccacaatcagcccagccgcagacaactatgaagagaccctctccacattaagatatgcagaccgagccaaaaggattgtgaaccatgctgttgtgaatgaggaccccaacgcaaaagtgatccgagaactgcgggaggaagtcgagaaactgagagagcagctctctcaggcagaggccatgaaggcccctgaactgaaggagaagctcgaagagtctgaaaagctgataaaagaactaacagtgacttgggaagagaagctgagaaaaacagaagagatagcacaggaaagacaacgacaacttgaaagcatggggatttccctggagatgtccggtatcaaggtgggggatgacaaatgctacttagtcaatctgaatgcagaccctgctcttaacgaacttctggtttattatttaaaggatcacaccagggtgggtgcagatacctctcaagatatccagctttttggcataggaattcagcctcagcactgtgagattgacattgcatctgatggagacgtcactctcactccaaaagaaaatgcaaggtcctgtgtgaacggcacccttgtgtgcagtaccacccagctgtggcatggtgaccgaatcctatggggaaataatcacttttttagaataaacttacctaagaggaaacgtcgagattggttgaaagactttgaaaaagaaacgggcccgccagagcatgacctggatgcagccagtgaggcttcctctgaaccagactataactatgaatttgcacagatggaagttatcatgaaaaccctgaatagtaatgacccagttcaaaatgtggttcaggtcctggagaaacaatacctagaagaaaagagaagtgccctagaggagcagcggctcatgtatgagcgggaactggagcaactccgccagcagctctcccccgacaggcagccacagagtagcggccctgaccgcctggcctacagcagccagacagcgcagcagaaggtgacccagtgggcagaagagagggatgaactcttccgacaaagcctggcaaaactgcgagagcagctggttaaagctaataccttggtgagggaagcaaacttcctggctgaggaaatgagcaaactcaccgattaccaagtgactcttcagatccctgctgcaaacctcagtgccaataggaagagaggtgcaatagtgagtgaaccagctatccaagtgaggaggaaaggaaagagcacccaagtgtggaccattgagaagctggagaataaattaattgacatgagagacctttaccaagaatggaaggaaaaagttcctgaggcaaagagactctacggaaaacgaggtgaccctttctatgaagcccaagaaaatcacaacctcatcggggtggcgaatgtattcttggaatgcctcttctgtgatgtgaaacttcagtatgcagtccctatcatcagccagcagggggaggttgcagggcgtctccacgtggaagtgatgcgtgttacaggagctgttccagagcgtgtggtggaggatgactcttcggagaattccagtgaaagtgggagccttgaagtcgtagacagcagcggggaaatcattcaccgagtcaaaaagctgacatgtcgggtaaaaattaaagaagcaacggggctgcccttaaacctctcaaattttgtcttctgtcaatacacattctgggaccagtgtgagtctacggtggctgccccggtggtggaccccgaggtgccttcaccacagtccaaggatgcccagtacacagtgaccttctcccactgtaaggactatgtggtgaatgtaacagaagaatttctggagttcatttcagatggagcactggccattgaagtatggggccaccggtgtgctggaaatggcagctccatctgggaggtcgattctcttcatgctaagacaagaacactgcatgacaggtggaatgaagtaacgcgaagaatagaaatgtggatctccatattagaattgaatgagttaggagagtatgctgcagtggaacttcatcaggcaaaagatgtcaacacaggaggcatctttcaacttagacagggtcattcccgtagagtacaagtcacggtgaaacctgtgcagcattcagggacactgccacttatggttgaagccatcctgtcagtatccatcggctgtgtaactgccaggtccaccaaactccaaagagggctggacagttaccagagagatgatgaggatggtgatgatatggatagttatcaggaagaagacttaaactgcgtaagggagaggtggtcagatgcactcattaaacgacgagaatacctggatgaacagataaaaaaagtcagcaataaaacagagaaaacagaggacgatgtggagcgggaagcccagcttgtggagcagtgggtagggctgactgaggaaaggaatgctgtgctggtgccagccccaggcagtgggattcctggggcacctgccgactggatcccacctcctggaatggaaacccacataccagttctcttcctcgatttgaatgcggatgacctcagtgccaatgagcagcttgttggcccccatgcatccggcgtgaactccatcctgcccaaggagcatggcagccagtttttctacctgcccatcataaagcacagtgatgatgaggtttcagccacagcctcttgggattcctcggtgcatgattctgttcacttgaatagggtcacaccacagaatgaaaggatttacctaattgtgaaaaccacagttcaactcagccaccctgctgctatggagttagtattacgaaaacgaattgcagccaatatttacaacaaacagagtttcacgcagagtttgaagaggagaatatccctgaaaaatatattttattcctgtggtgtaacctatgaaatagtatccaatataccaaaggcaactgaggagatagaggaccgggaaacgctggctctcctggcagcaaggagtgaaaacgaaggcacatcagatggggagacgtacattgagaagtacactcgaggcgtgctgcaggtggaaaacattctgagtcttgaacggctccggcaggcaatcaaagaagcactttccaccaaagcccggcacattcggaggagcctcagtacaccaaatgttcataatgtctcttccagccgaccggacctttctggctttgatgaagatgacaagggttggccagagaaccagttggacatgtctgactatagctccagttaccaagatgtagcatgttatggaactttacccagggattctcctcgaaggaataaagaaggttgtacatcagagactcctcatgccttaaccgtcagcccttttaaagcattctctcctcagccaccaaagtttttcaagcccctaatgcctgtaaaagaggagcataagaaaaggatagccctggaagcaaggcctcttctaagccaggagagcatgcctccacctcaggcacataaccctggctgcattgtaccctcaggaagcaatggcagcagcatgccagtagaacacaatagcaaacgtgagaagaagattgtaagttccggaaccatttctgtcatattgcctggtggtgggtttaaggccctttcacagacaatcatccaaatgctagaagaaattaagacatgtattgggtctttgtcttaaagaaaataaaaatgtgaccattggtaatgatattttgcatggatgtggccatgacctacaattttatcttatttatttatttattttttgcttaagtttgcttagaaaaagggagaaaggcacttttattgcttctggcctttataaaaagtgtaacaaagagatctttttaataccaaaatctttctaatgtgcctatacatattgcctagattctgaagttaatctacctagaggaagtgcacttacttggagtaagtaatcatgcatttaatgcatttagctgtggatatgtttggaagcttttttatgttgcctgatgctattgccaagataattctgtagttagagctgcactacaatctatcataatcacccttcatcgtctcactgtctagggtagcctttgttaattagctggcaaaatatattccaataccttggtgccagccttgcattcaggatggcttatatatattttgccacaggtaggctgaaactctacccacaaaacctcattccttagcacttggttttaaaattattaatttgagatacagttttaaaaacactgcataccaggcaccttaggttataaattatacctcaatttac

SEQ ID NO: 1631 - protein, 1489 aa, Homo sapiens
MDESNTTKYAGQEVVFKCLGEGIKAFQGYNACIFAYGQTGSGKSFSMMGHAEQLGLIPRLCCALFKRISLEQNESQTFKVEVSYMEIYNEKVRDLLDPKGSRQSLKVREHKVLGPYVDGLSQLAVTSFEDIESLMSEGNKSRTVAATNMNEESSRSHAVFNIIITQTLYDLQSGNSGEKVSKVSLVDLAGSVSKTGAAGERLKEGSNINKSLTTLGLVISSLADQAAGKGKSKFVPYRDSVLTWLLKDNLGGNSQTSMIATISPAADNYEETLSTLRYADRAKRIVNHAVVNEDPNAKVIRELREEVEKLREQLSQAEAMKAPELKEKLEESEKLIKELTVTWEEKLRKTEEIAQERQRQLESMGISLEMSGIKVGDDKCYLVNLNADPALNELLVYYLKDHTRVGADTSQDIQLFGIGIQPQHCEIDIASDGDVTLTPKENARSCVNGTLVCSTTQLWHGDRILWGNNHFFRINLPKRKRRDWLKDFEKETGPPEHDLDAASEASSEPDYNYEFAQMEVIMKTLNSNDPVQNVVQVLEKQYLEEKRSALEEQRLMYERELEQLRQQLSPDRQPQSSGPDRLAYSSQTAQQKVTQWAEERDELFRQSLAKLREQLVKANTLVREANFLAEEMSKLTDYQVTLQIPAANLSANRKRGAIVSEPAIQVRRKGKSTQVWTIEKLENKLIDMRDLYQEWKEKVPEAKRLYGKRGDPFYEAQENHNLIGVANVFLECLFCDVKLQYAVPIISQQGEVAGRLHVEVMRVTGAVPERVVEDDSSENSSESGSLEVVDSSGEIIHRVKKLTCRVKIKEATGLPLNLSNFVFCQYTFWDQCESTVAAPVVDPEVPSPQSKDAQYTVTFSHCKDYVVNVTEEFLEFISDGAIEVWGHRCAGNGSSIWEVDSLHAKTRTLHDRWNEVTRRIEMWISILNELGEYAAVELHQAKDVNTGGIFQLRQGHSRRVQVTVKPVQHSGTLPLMVEAILSVSIGCVTARSTKLQRGLDSYQRDDEDGDDMDSYQEEDLNCVRERWSDALIKRREYLDEQIKKVSNKTEKTEDDVEREAQLVEQWVGLTEERNAVLVPAPGSGIPGAPADWIPPPGMHIPVLFLDLNADDLSANEQLVGPHASGVNSILPKEHGSQFFYLPIIKHSDDEVSATASWDSSVHDSVHLNRVTPQNERIYLIVKTTVQLSHPAAMELVLRKRIAANIYNKQSFTQSLKRRISLKNIFYSCGVTYEIVSNIPKATEEIEDRETLALLAARSENEGTSDGETYIEKYTRGVLQVENILSLERLRQAIKEALSTKARHIRRSLSTPNVHNVSSSRPDLSGFDEDDKGWPENQLDMSDYSSSYQDVACYGTLPRDSPRRNKEGCTSETPHALTVSPFKAFSPQPPKFFKPLMPVKEEHKKRIALEARPLLSQESMPPPQAHNPGCIVPSGSNGSSMPVEHNSKREKKIVSSGTISVILPGGGFKALSQTIIQMLEEIKTCIGSLS

SEQ ID NO: 1632 - DNA, 5787 bp, Homo sapiens
gcggccgcgctcgaggggcgcgcggctgcagcggcggcggcgccgcgcgtgaggggccgcctaaggccgagcgggcgcggcgagcggccgggcgagcgcagccaacatgtcggataccaaggtaaaagttgccgtccgggtccggcccatgaaccgacgagaactggaactgaacaccaagtgcgtggtggagatggaagggaatcaaacggtcctgcaccctcctccttctaacaccaaacagggagaaaggaaacctcccaaggtatttgcctttgattattgcttttggtccatggatgaatctaacactacaaaatacgctggtcaagaagtggttttcaagtgccttggggaaggaattcttgaaaaagcctttcaggggtataatgcgtgtatttttgcatatggacagacaggttcgggaaaatccttttccatgatgggccatgctgagcagctgggccttattccaaggctctgctgtgctttatttaaaaggatctctttggagcaaaatgagtcacagacctttaaagttgaagtgtcctatatggaaatttataatgagaaagttcgggatcttttagaccccaaagggagtagacagtctcttaaagttcgagaacataaagttttgggaccatatgtagatggtttatctcaactagctgtcactagttttgaggatattgagtcattgatgtctgagggaaataagtctcgaacggtagctgctaccaacatgaacgaagaaagcagccgctcccatgctgtgttcaacatcataatcacacagacactttatgacctgcagtctgggaattccggggagaaagtcagtaaggtcagcttggtagacctggcgggtagcgaaagagtatctaaaacaggagctgcaggagagcgactgaaagaaggcagcaacattaacaaatcgcttacaaccttggggttggttatatcatcactggctgaccaggcagctggcaagggtaaaagcaaatttgtgccttatcgagattcagtcctcacttggctgcttaaggacaacttggggggcaacagccaaacctctatgatagccacaatcagcccagccgcagacaactatgaagagaccctctccacattaagatatgcagaccgagccaaaaggattgtgaaccatgctgttgtgaatgaggaccccaacgcaaaagtgatccgagaactgcgggaggaagtcgagaaactgagagagcagctctctcaggcagaggccatgaaggcccctgaactgaaggagaagctcgaagagtctgaaaagctgataaaagaactaacagtgacttgggaagagaagctgagaaaaacagaagagatagcacaggaaagacaacgacaacttgaaagcatggggatttccctggagatgtccggtatcaaggtgggggatgacaaatgctacttagtcaatctgaatgcagaccctgctcttaacgaacttctggtttattatttaaaggatcacaccagggtgggtgcagatacctctcaagatatccagctttttggcataggaattcagcctcagcactgtgagattgacattgcatctgatggagacgtcactctcactccaaaagaaaatgcaaggtcctgtgtgaacggcacccttgtgtgcagtaccacccagctgtggcatggtgaccgaatcctatggggaaataatcacttttttagaataaacttacctaagaggaaacgtcgagattggttgaaagactttgaaaaagaaacgggcccgccagagcatgacctggatgcagccagtgaggcttcctctgaaccagactataactatgaatttgcacagatggaagttatcatgaaaaccctgaatagtaatgacccagttcaaaatgtggttcaggtcctggagaaacaatacctagaagaaaagagaagtgccctagaggagcagcggctcatgtatgagcgggaactggagcaactccgccagcagctctcccccgacaggcagccacagagtagcggccctgaccgcctggcctacagcagccagacagcgcagcagaaggtgacccagtgggcagaagagagggatgaactcttccgacaaagcctggcaaaactgcgagagcagctggttaaagctaataccttggtgagggaagcaaacttcctggctgaggaaatgagcaaactcaccgattaccaagtgactcttcagatccctgctgcaaacctcagtgccaataggaagagaggtgcaatagtgagtgaaccagctatccaagtgaggaggaaaggaaagagcacccaagtgtggaccattgagaagctggagaataaattaattgacatgagagacctttaccaagaatggaaggaaaaagttcctgaggcaaagagactctacggaaaacgaggtgaccctttctatgaagcccaagaaaatcacaacctcatcggggtggcgaatgtattcttggaatgcctcttctgtgatgtgaaacttcagtatgcagtccctatcatcagccagcagggggaggttgcagggcgtctccacgtggaagtgatgcgtgttacaggagctgttccagagcgtgtggtggaggatgactcttcggagaattccagtgaaagtgggagccttgaagtcgtagacagcagcggggaaatcattcaccgagtcaaaaagctgacatgtcgggtaaaaattaaagaagcaacggggctgcccttaaacctctcaaattttgtcttctgtcaatacacattctgggaccagtgtgagtctacggtggctgccccggtggtggaccccgaggtgccttcaccacagtccaaggatgcccagtacacagtgaccttctcccactgtaaggactatgtggtgaatgtaacagaagaatttctggagttcatttcagatggagcactggccattgaagtatggggccaccggtgtgctggaaatggcagctccatctgggaggtcgattctcttcatgctaagacaagaacactgcatgacaggtggaatgaagtaacgcgaagaatagaaatgtggatctccatattagaattgaatgagttaggagagtatgctgcagtggaacttcatcaggcaaaagatgtcaacacaggaggcatctttcaacttagacagggtcattcccgtagagtacaagtcacggtgaaacctgtgcagcattcagggacactgccacttatggttgaagccatcctgtcagtatccatcggctgtgtaactgccaggtccaccaaactccaaagagggctggacagttaccaggaagaagacttaaactgcgtaagggagaggtggtcagatgcactcattaaacgacgagaatacctggatgaacagataaaaaaagtcagcaataaaacagagaaaacagaggacgatgtggagcgggaagcccagcttgtggagcagtgggtagggctgactgaggaaaggaatgctgtgctggtgccagccccaggcagtgggattcctggggcacctgccgactggatcccacctcctggaatggaaacccacataccagttctcttcctcgatttgaatgcggatgacctcagtgccaatgagcagcttgttggcccccatgcatccggcgtgaactccatcctgcccaaggagcatggcagccagtttttctacctgcccatcataaagcacagtgatgatgaggtttcagccacagcctcttgggattcctcggtgcatgattctgttcacttgaatagggtcacaccacagaatgaaaggatttacctaattgtgaaaaccacagttcaactcagccaccctgctgctatggagttagtattacgaaaacgaattgcagccaatatttacaacaaacagagtttcacgcagagtttgaagaggagaatatccctgaaaaatatattttattcctgtggtgtaacctatgaaatagtatccaatataccaaaggcaactgaggagatagaggaccgggaaacgctggctctcctggcagcaaggagtgaaaacgaaggcacatcagatggggagacgtacattgagaagtacactcgaggcgtgctgcaggtggaaaacattctgagtcttgaacggctccggcaggcaatcaaagaagcactttccaccaaagcccggcacattcggaggagcctcagtacaccaaatgttcataatgtctcttccagccgaccggacctttctggctttgatgaagatgacaagggttggccagagaaccagttggacatgtctgactatagctccagttaccaagatgtagcatgttatggaactttacccagggattctcctcgaaggaataaagaaggttgtacatcagagactcctcatgccttaaccgtcagcccttttaaagcattctctcctcagccaccaaagtttttcaagcccctaatgcctgtaaaagaggagcataagaaaaggatagccctggaagcaaggcctcttctaagccaggaggactctgaggaggaagaaaatgagctggaagctattaacaggaagctaataagttcacagccttatgtacctgtggagtttgctgacttcagtgtttacaatgccagcttggagaacagggaatggttttcctctaaagtagatctgtcaaactcacgggtcttggagaaagaagtgtcccgtagccctaccaccagcagtattaccagtggctacttttcccacagtgcctccaatgccaccctgtctgacatggtggtcccttctagtgacagctcagaccagctggccattcagacgaaggatgcagactccaccgagcactccacaccatcgcttgtgcatgatttcaggccgtcctcaaacaaagagttgacagaagtcgaaaaaggcttggtaaaggacaagataattgtggtgccactcaaggaaaacagtgccttagccaaagggagcccatcatcccagagcatccctgagaaaaactccaaatcactgtgcaggactggctcatgttcagaactagatgcctgccccagcaaaattagccagccagccaggggattctgccccagggaggtgacggtagaacacaccaccaacatccttgaagaccattctttcacagaatttatgggagtgtcagagggaaaagattttgatggtttgacagattcttctgctggagagctttccagtaggaggagtctaccaaataaaacaggcggcaagactgtctccgatgggctccaccaccccagccagctgcattccaagttagagaatgaccaggtaataattccagaggcagccttttgggttctgtgctgtcaatgagtatgtctaactgtatgtcaaccccagaggcccttcaccgcaacaacttggtaggaaagattcatccagttgtttgtgacagcaaagatgagcccacagagaagcaggctcacttcctgcacagctgtctctgtcggagagcaagtctgttttgggaactagaacgcaattgtgaaattataagaccagtggatttttttacctggcacatgggttggtgttgaatgaagtgttcagatggataaggatcaatctcatattcattccctgggatgtttagttaccagttttcccaaagtgttctggtagcatctaccatatttcatcaaatctgtgattcctttgattattatatgaaccattattttatgtatcattaagaaaaaatactgccaattaaactctgtcatatc

SEQ ID NO: 1633 - protein, 1737 aa, Homo sapiens
MSDTKVKVAVRVRPMNRRELELNTKCVVEMEGNQTVLHPPPSNTKQGERKPPKVFAFDYCFWSMDESNTTKYAGQEVVFKCLGEGIKAFQGYNACIFAYGQTGSGKSFSMMGHAEQLGLIPRLCCALFKRISLEQNESQTFKVEVSYMEIYNEKVRDLLDPKGSRQSLKVREHKVLGPYVDGLSQLAVTSFEDIESLMSEGNKSRTVAATNMNEESSRSHAVFNIIITQTLYDLQSGNSGEKVSKVSLVDLAGSVSKTGAAGERLKEGSNINKSLTTLGLVISSLADQAAGKGKSKFVPYRDSVLTWLLKDNLGGNSQTSMIATISPAADNYEETLSTLRYADRAKRIVNHAVVNEDPNAKVIRELREEVEKLREQLSQAEAMKAPELKEKLEESEKLIKELTVTWEEKLRKTEEIAQERQRQLESMGISLEMSGIKVGDDKCYLVNLNADPALNELLVYYLKDHTRVGADTSQDIQLFGIGIQPQHCEIDIASDGDVTLTPKENARSCVNGTLVCSTTQLWHGDRILWGNNHFFRINLPKRKRRDWLKDFEKETGPPEHDLDAASEASSEPDYNYEFAQMEVIMKTLNSNDPVQNVVQVLEKQYLEEKRSALEEQRLMYERELEQLRQQLSPDRQPQSSGPDRLAYSSQTAQQKVTQWAEERDELFRQSLAKLREQLVKANTLVREANFLAEEMSKLTDYQVTLQIPAANLSANRKRGAIVSEPAIQVRRKGKSTQVWTIEKLENKLIDMRDLYQEWKEKVPEAKRLYGKRGDPFYEAQENHNLIGVANVFLECLFCDVKLQYAVPIISQQGEVAGRLHVEVMRVTGAVPERVVEDDSSENSSESGSLEVVDSSGEIIHRVKKLTCRVKIKEATGLPLNLSNFVFCQYTFWDQCESTVAAPVVDPEVPSPQSKDAQYTVTFSHCKDYVVNVTEEFLEFISDGAIEVWGHRCAGNGSSIWEVDSLHAKTRTLHDRWNEVTRRIEMWISILNELGEYAAVELHQAKDVNTGGIFQLRQGHSRRVQVTVKPVQHSGTLPLMVEAILSVSIGCVTARSTKLQRGLDSYQEEDLNCVRERWSDALIKRREYLDEQIKKVSNKTEKTEDDVEREAQLVEQWVGLTEERNAVLVPAPGSGIPGAPADWIPPPGMHIPVLFLDLNADDLSANEQLVGPHASGVNSILPKEHGSQFFYLPIIKHSDDEVSATASWDSSVHDSVHLNRVTPQNERIYLIVKTTVQLSHPAAMELVLRKRIAANIYNKQSFTQSLKRRISLKNIFYSCGVTYEIVSNIPKATEEIEDRETLALLAARSENEGTSDGETYIEKYTRGVLQVENILSLERLRQAIKEALSTKARHIRRSLSTPNVHNVSSSRPDLSGFDEDDKGWPENQLDMSDYSSSYQDVACYGTLPRDSPRRNKEGCTSETPHALTVSPFKAFSPQPPKFFKPLMPVKEEHKKRIALEARPLLSQEDSEEEENELEAINRKLISSQPYVPVEFADFSVYNASLENREWFSSKVDLSNSRVLEKEVSRSPTTSSITSGYFSHSNATLSDMVVPSSDSSDQLAIQTKDADSTEHSTPSLVHDFRPSSNKELTEVEKGLVKDKIIVVPLKENSAKGSPSSQSIPEKNSKSLCRTGSCSELDACPSKISQPRFCPREVTVEHTTNIDHSFTEFMGVSEGKDFDGLTDSSAGELSSRRSLPNKTGGKTVSDGLHHPSQLHSKLENDQVIIPEAAFWVLCCQ

SEQ ID NO: 1634 - DNA, 5931 bp, Homo sapiens
gcggccgcgctcgaggggcgcgcggctgcagcggcggcggcgccgcgcgtgaggggccgcctaaggccgagcgggcgcggcgagcggccgggcgagcgcagccaacatgtcggataccaaggtaaaagttgccgtccgggtccggcccatgaaccgacgagaactggaactgaacaccaagtgcgtggtggagatggaagggaatcaaacggtcctgcaccctcctccttctaacaccaaacagggagaaaggaaacctcccaaggtatttgcctttgattattgcttttggtccatggatgaatctaacactacaaaatacgctggtcaagaagtggttttcaagtgccttggggaaggaattcttgaaaaagcctttcaggggtataatgcgtgtatttttgcatatggacagacaggttcgggaaaatccttttccatgatgggccatgctgagcagctgggccttattccaaggctctgctgtgctttatttaaaaggatctctttggagcaaaatgagtcacagacctttaaagttgaagtgtcctatatggaaatttataatgagaaagttcgggatcttttagaccccaaagggagtagacagtctcttaaagttcgagaacataaagttttgggaccatatgtagatggtttatctcaactagctgtcactagttttgaggatattgagtcattgatgtctgagggaaataagtctcgaacggtagctgctaccaacatgaacgaagaaagcagccgctcccatgctgtgttcaacatcataatcacacagacactttatgacctgcagtctgggaattccggggagaaagtcagtaaggtcagcttggtagacctggcgggtagcgaaagagtatctaaaacaggagctgcaggagagcgactgaaagaaggcagcaacattaacaaatcgcttacaaccttggggttggttatatcatcactggctgaccaggcagctggcaagggtaaaagcaaatttgtgccttatcgagattcagtcctcacttggctgcttaaggacaacttggggggcaacagccaaacctctatgatagccacaatcagcccagccgcagacaactatgaagagaccctctccacattaagatatgcagaccgagccaaaaggattgtgaaccatgctgttgtgaatgaggaccccaacgcaaaagtgatccgagaactgcgggaggaagtcgagaaactgagagagcagctctctcaggcagaggccatgaaggcccctgaactgaaggagaagctcgaagagtctgaaaagctgataaaagaactaacagtgacttgggaagagaagctgagaaaaacagaagagatagcacaggaaagacaacgacaacttgaaagcatggggatttccctggagatgtccggtatcaaggtgggggatgacaaatgctacttagtcaatctgaatgcagaccctgctcttaacgaacttctggtttattatttaaaggatcacaccagggtgggtgcagatacctctcaagatatccagctttttggcataggaattcagcctcagcactgtgagattgacattgcatctgatggagacgtcactctcactccaaaagaaaatgcaaggtcctgtgtgaacggcacccttgtgtgcagtaccacccagctgtggcatggtgaccgaatcctatggggaaataatcacttttttagaataaacttacctaagaggaaacgtcgagattggttgaaagactttgaaaaagaaacgggcccgccagagcatgacctggatgcagccagtgaggcttcctctgaaccagactataactatgaatttgcacagatggaagttatcatgaaaaccctgaatagtaatgacccagttcaaaatgtggttcaggtcctggagaaacaatacctagaagaaaagagaagtgccctagaggagcagcggctcatgtatgagcgggaactggagcaactccgccagcagctctcccccgacaggcagccacagagtagcggccctgaccgcctggcctacagcagccagacagcgcagcagaaggtgacccagtgggcagaagagagggatgaactcttccgacaaagcctggcaaaactgcgagagcagctggttaaagctaataccttggtgagggaagcaaacttcctggctgaggaaatgagcaaactcaccgattaccaagtgactcttcagatccctgctgcaaacctcagtgccaataggaagagaggtgcaatagtgagtgaaccagctatccaagtgaggaggaaaggaaagagcacccaagtgtggaccattgagaagctggagaataaattaattgacatgagagacctttaccaagaatggaaggaaaaagttcctgaggcaaagagactctacggaaaacgaggtgaccctttctatgaagcccaagaaaatcacaacctcatcggggtggcgaatgtattcttggaatgcctcttctgtgatgtgaaacttcagtatgcagtccctatcatcagccagcagggggaggttgcagggcgtctccacgtggaagtgatgcgtgttacaggagctgttccagagcgtgtggtggaggatgactcttcggagaattccagtgaaagtgggagccttgaagtcgtagacagcagcggggaaatcattcaccgagtcaaaaagctgacatgtcgggtaaaaattaaagaagcaacggggctgcccttaaacctctcaaattttgtcttctgtcaatacacattctgggaccagtgtgagtctacggtggctgccccggtggtggaccccgaggtgccttcaccacagtccaaggatgcccagtacacagtgaccttctcccactgtaaggactatgtggtgaatgtaacagaagaatttctggagttcatttcagatggagcactggccattgaagtatggggccaccggtgtgctggaaatggcagctccatctgggaggtcgattctcttcatgctaagacaagaacactgcatgacaggtggaatgaagtaacgcgaagaatagaaatgtggatctccatattagaattgaatgagttaggagagtatgctgcagtggaacttcatcaggcaaaagatgtcaacacaggaggcatctttcaacttagacagggtcattcccgtagagtacaagtcacggtgaaacctgtgcagcattcagggacactgccacttatggttgaagccatcctgtcagtatccatcggctgtgtaactgccaggtccaccaaactccaaagagggctggacagttaccagagagatgatgaggatggtgatgatatggatagttatcaggaagaagacttaaactgcgtaagggagaggtggtcagatgcactcattaaacgacgagaatacctggatgaacagataaaaaaagtcagcaataaaacagagaaaacagaggacgatgtggagcgggaagcccagcttgtggagcagtgggtagggctgactgaggaaaggaatgctgtgctggtgccagccccaggcagtgggattcctggggcacctgccgactggatcccacctcctggaatggaaacccacataccagttctcttcctcgatttgaatgcggatgacctcagtgccaatgagcagcttgttggcccccatgcatccggcgtgaactccatcctgcccaaggagcatggcagccagtttttctacctgcccatcataaagcacagtgatgatgaggtttcagccacagcctcttgggattcctcggtgcatgattctgttcacttgaatagggtcacaccacagaatgaaaggatttacctaattgtgaaaaccacagttcaactcagccaccctgctgctatggagttagtattacgaaaacgaattgcagccaatatttacaacaaacagagtttcacgcagagtttgaagaggagaatatccctgaaaaatatattttattcctgtggtgtaacctatgaaatagtatccaatataccaaaggcaactgaggagatagaggaccgggaaacgctggctctcctggcagcaaggagtgaaaacgaaggcacatcagatggggagacgtacattgagaagtacactcgaggcgtgctgcaggtggaaaacattctgagtcttgaacggctccggcaggcaatcaaagaagcactttccaccaaagcccggcacattcggaggagcctcagtacaccaaatgttcataatgtctcttccagccgaccggacctttctggctttgatgaagatgacaagggttggccagagaaccagttggacatgtctgactatagctccagttaccaagatgtagcatgttatggaactttacccagggattctcctcgaaggaataaagaaggttgtacatcagagactcctcatgccttaaccgtcagcccttttaaagcattctctcctcagccaccaaagtttttcaagcccctaatgcctgtaaaagaggagcataagaaaaggatagccctggaagcaaggcctcttctaagccaggagagcatgcctccacctcaggcacataaccctggctgcattgtaccctcaggaagcaatggcagcagcatgccagtagaacacaatagcaaacgtgagaagaagattgactctgaggaggaagaaaatgagctggaagctattaacaggaagctaataagttcacagccttatgtacctgtggagtttgctgacttcagtgtttacaatgccagcttggagaacagggaatggttttcctctaaagtagatctgtcaaactcacgggtcttggagaaagaagtgtcccgtagccctaccaccagcagtattaccagtggctacttttcccacagtgcctccaatgccaccctgtctgacatggtggtcccttctagtgacagctcagaccagctggccattcagacgaaggatgcagactccaccgagcactccacaccatcgcttgtgcatgatttcaggccgtcctcaaacaaagagttgacagaagtcgaaaaaggcttggtaaaggacaagataattgtggtgccactcaaggaaaacagtgccttagccaaagggagcccatcatcccagagcatccctgagaaaaactccaaatcactgtgcaggactggctcatgttcagaactagatgcctgccccagcaaaattagccagccagccaggggattctgccccagggaggtgacggtagaacacaccaccaacatccttgaagaccattctttcacagaatttatgggagtgtcagagggaaaagattttgatggtttgacagattcttctgctggagagctttccagtaggaggagtctaccaaataaaacaggcggcaagactgtctccgatgggctccaccaccccagccagctgcattccaagttagagaatgaccaggtaataattccagaggcagccttttgggttctgtgctgtcaatgagtatgtctaactgtatgtcaaccccagaggcccttcaccgcaacaacttggtaggaaagattcatccagttgtttgtgacagcaaagatgagcccacagagaagcaggctcacttcctgcacagctgtctctgtcggagagcaagtctgttttgggaactagaacgcaattgtgaaattataagaccagtggatttttttacctggcacatgggttggtgttgaatgaagtgttcagatggataaggatcaatctcatattcattccctgggatgtttagttaccagttttcccaaagtgttctggtagcatctaccatatttcatcaaatctgtgattcctttgattattatatgaaccattattttatgtatcattaagaaaaaatactgccaattaaactctgtcatatc

SEQ ID NO: 1635 - protein, 1785 aa, Homo sapiens
MSDTKVKVAVRVRPMNRRELELNTKCVVEMEGNQTVLHPPPSNTKQGERKPPKVFAFDYCFWSMDESNTTKYAGQEVVFKCLGEGIKAFQGYNACIFAYGQTGSGKSFSMMGHAEQLGLIPRLCCALFKRISLEQNESQTFKVEVSYMEIYNEKVRDLLDPKGSRQSLKVREHKVLGPYVDGLSQLAVTSFEDIESLMSEGNKSRTVAATNMNEESSRSHAVFNIIITQTLYDLQSGNSGEKVSKVSLVDLAGSVSKTGAAGERLKEGSNINKSLTTLGLVISSLADQAAGKGKSKFVPYRDSVLTWLLKDNLGGNSQTSMIATISPAADNYEETLSTLRYADRAKRIVNHAVVNEDPNAKVIRELREEVEKLREQLSQAEAMKAPELKEKLEESEKLIKELTVTWEEKLRKTEEIAQERQRQLESMGISLEMSGIKVGDDKCYLVNLNADPALNELLVYYLKDHTRVGADTSQDIQLFGIGIQPQHCEIDIASDGDVTLTPKENARSCVNGTLVCSTTQLWHGDRILWGNNHFFRINLPKRKRRDWLKDFEKETGPPEHDLDAASEASSEPDYNYEFAQMEVIMKTLNSNDPVQNVVQVLEKQYLEEKRSALEEQRLMYERELEQLRQQLSPDRQPQSSGPDRLAYSSQTAQQKVTQWAEERDELFRQSLAKLREQLVKANTLVREANFLAEEMSKLTDYQVTLQIPAANLSANRKRGAIVSEPAIQVRRKGKSTQVWTIEKLENKLIDMRDLYQEWKEKVPEAKRLYGKRGDPFYEAQENHNLIGVANVFLECLFCDVKLQYAVPIISQQGEVAGRLHVEVMRVTGAVPERVVEDDSSENSSESGSLEVVDSSGEIIHRVKKLTCRVKIKEATGLPLNLSNFVFCQYTFWDQCESTVAAPVVDPEVPSPQSKDAQYTVTFSHCKDYVVNVTEEFLEFISDGAIEVWGHRCAGNGSSIWEVDSLHAKTRTLHDRWNEVTRRIEMWISILNELGEYAAVELHQAKDVNTGGIFQLRQGHSRRVQVTVKPVQHSGTLPLMVEAILSVSIGCVTARSTKLQRGLDSYQRDDEDGDDMDSYQEEDLNCVRERWSDALIKRREYLDEQIKKVSNKTEKTEDDVEREAQLVEQWVGLTEERNAVLVPAPGSGIPGAPADWIPPPGMHIPVLFLDLNADDLSANEQLVGPHASGVNSILPKEHGSQFFYLPIIKHSDDEVSATASWDSSVHDSVHLNRVTPQNERIYLIVKTTVQLSHPAAMELVLRKRIAANIYNKQSFTQSLKRRISLKNIFYSCGVTYEIVSNIPKATEEIEDRETLALLAARSENEGTSDGETYIEKYTRGVLQVENILSLERLRQAIKEALSTKARHIRRSLSTPNVHNVSSSRPDLSGFDEDDKGWPENQLDMSDYSSSYQDVACYGTLPRDSPRRNKEGCTSETPHALTVSPFKAFSPQPPKFFKPLMPVKEEHKKRIALEARPLLSQESMPPPQAHNPGCIVPSGSNGSSMPVEHNSKREKKIDSEEEENELEAINRKLISSQPYVPVEFADFSVYNASLENREWFSSKVDLSNSRVLEKEVSRSPTTSSITSGYFSHSNATLSDMVVPSSDSSDQLAIQTKDADSTEHSTPSLVHDFRPSSNKELTEVEKGLVKDKIIVVPLKENSAKGSPSSQSIPEKNSKSLCRTGSCSELDACPSKISQPRFCPREVTVEHTTNIDHSFTEFMGVSEGKDFDGLTDSSAGELSSRRSLPNKTGGKTVSDGLHHPSQLHSKLENDQVIIPEAAFWVLCCQ

SEQ ID NO: 1636 - DNA, 5826 bp, Homo sapiens
gcggccgcgctcgaggggcgcgcggctgcagcggcggcggcgccgcgcgtgaggggccgcctaaggccgagcgggcgcggcgagcggccgggcgagcgcagccaacatgtcggataccaaggtaaaagttgccgtccgggtccggcccatgaaccgacgagaactggaactgaacaccaagtgcgtggtggagatggaagggaatcaaacggtcctgcaccctcctccttctaacaccaaacagggagaaaggaaacctcccaaggtatttgcctttgattattgcttttggtccatggatgaatctaacactacaaaatacgctggtcaagaagtggttttcaagtgccttggggaaggaattcttgaaaaagcctttcaggggtataatgcgtgtatttttgcatatggacagacaggttcgggaaaatccttttccatgatgggccatgctgagcagctgggccttattccaaggctctgctgtgctttatttaaaaggatctctttggagcaaaatgagtcacagacctttaaagttgaagtgtcctatatggaaatttataatgagaaagttcgggatcttttagaccccaaagggagtagacagtctcttaaagttcgagaacataaagttttgggaccatatgtagatggtttatctcaactagctgtcactagttttgaggatattgagtcattgatgtctgagggaaataagtctcgaacggtagctgctaccaacatgaacgaagaaagcagccgctcccatgctgtgttcaacatcataatcacacagacactttatgacctgcagtctgggaattccggggagaaagtcagtaaggtcagcttggtagacctggcgggtagcgaaagagtatctaaaacaggagctgcaggagagcgactgaaagaaggcagcaacattaacaaatcgcttacaaccttggggttggttatatcatcactggctgaccaggcagctggcaagggtaaaagcaaatttgtgccttatcgagattcagtcctcacttggctgcttaaggacaacttggggggcaacagccaaacctctatgatagccacaatcagcccagccgcagacaactatgaagagaccctctccacattaagatatgcagaccgagccaaaaggattgtgaaccatgctgttgtgaatgaggaccccaacgcaaaagtgatccgagaactgcgggaggaagtcgagaaactgagagagcagctctctcaggcagaggccatgaaggcccctgaactgaaggagaagctcgaagagtctgaaaagctgataaaagaactaacagtgacttgggaagagaagctgagaaaaacagaagagatagcacaggaaagacaacgacaacttgaaagcatggggatttccctggagatgtccggtatcaaggtgggggatgacaaatgctacttagtcaatctgaatgcagaccctgctcttaacgaacttctggtttattatttaaaggatcacaccagggtgggtgcagatacctctcaagatatccagctttttggcataggaattcagcctcagcactgtgagattgacattgcatctgatggagacgtcactctcactccaaaagaaaatgcaaggtcctgtgtgaacggcacccttgtgtgcagtaccacccagctgtggcatggtgaccgaatcctatggggaaataatcacttttttagaataaacttacctaagaggaaacgtcgagattggttgaaagactttgaaaaagaaacgggcccgccagagcatgacctggatgcagccagtgaggcttcctctgaaccagactataactatgaatttgcacagatggaagttatcatgaaaaccctgaatagtaatgacccagttcaaaatgtggttcaggtcctggagaaacaatacctagaagaaaagagaagtgccctagaggagcagcggctcatgtatgagcgggaactggagcaactccgccagcagctctcccccgacaggcagccacagagtagcggccctgaccgcctggcctacagcagccagacagcgcagcagaaggtgacccagtgggcagaagagagggatgaactcttccgacaaagcctggcaaaactgcgagagcagctggttaaagctaataccttggtgagggaagcaaacttcctggctgaggaaatgagcaaactcaccgattaccaagtgactcttcagatccctgctgcaaacctcagtgccaataggaagagaggtgcaatagtgagtgaaccagctatccaagtgaggaggaaaggaaagagcacccaagtgtggaccattgagaagctggagaataaattaattgacatgagagacctttaccaagaatggaaggaaaaagttcctgaggcaaagagactctacggaaaacgaggtgaccctttctatgaagcccaagaaaatcacaacctcatcggggtggcgaatgtattcttggaatgcctcttctgtgatgtgaaacttcagtatgcagtccctatcatcagccagcagggggaggttgcagggcgtctccacgtggaagtgatgcgtgttacaggagctgttccagagcgtgtggtggaggatgactcttcggagaattccagtgaaagtgggagccttgaagtcgtagacagcagcggggaaatcattcaccgagtcaaaaagctgacatgtcgggtaaaaattaaagaagcaacggggctgcccttaaacctctcaaattttgtcttctgtcaatacacattctgggaccagtgtgagtctacggtggctgccccggtggtggaccccgaggtgccttcaccacagtccaaggatgcccagtacacagtgaccttctcccactgtaaggactatgtggtgaatgtaacagaagaatttctggagttcatttcagatggagcactggccattgaagtatggggccaccggtgtgctggaaatggcagctccatctgggaggtcgattctcttcatgctaagacaagaacactgcatgacaggtggaatgaagtaacgcgaagaatagaaatgtggatctccatattagaattgaatgagttaggagagtatgctgcagtggaacttcatcaggcaaaagatgtcaacacaggaggcatctttcaacttagacagggtcattcccgtagagtacaagtcacggtgaaacctgtgcagcattcagggacactgccacttatggttgaagccatcctgtcagtatccatcggctgtgtaactgccaggtccaccaaactccaaagagggctggacagttaccagagagatgatgaggatggtgatgatatggatagttatcaggaagaagacttaaactgcgtaagggagaggtggtcagatgcactcattaaacgacgagaatacctggatgaacagataaaaaaagtcagcaataaaacagagaaaacagaggacgatgtggagcgggaagcccagcttgtggagcagtgggtagggctgactgaggaaaggaatgctgtgctggtgccagccccaggcagtgggattcctggggcacctgccgactggatcccacctcctggaatggaaacccacataccagttctcttcctcgatttgaatgcggatgacctcagtgccaatgagcagcttgttggcccccatgcatccggcgtgaactccatcctgcccaaggagcatggcagccagtttttctacctgcccatcataaagcacagtgatgatgaggtttcagccacagcctcttgggattcctcggtgcatgattctgttcacttgaatagggtcacaccacagaatgaaaggatttacctaattgtgaaaaccacagttcaactcagccaccctgctgctatggagttagtattacgaaaacgaattgcagccaatatttacaacaaacagagtttcacgcagagtttgaagaggagaatatccctgaaaaatatattttattcctgtggtgtaacctatgaaatagtatccaatataccaaaggcaactgaggagatagaggaccgggaaacgctggctctcctggcagcaaggagtgaaaacgaaggcacatcagatggggagacgtacattgagaagtacactcgaggcgtgctgcaggtggaaaacattctgagtcttgaacggctccggcaggcaatcaaagaagcactttccaccaaagcccggcacattcggaggagcctcagtacaccaaatgttcataatgtctcttccagccgaccggacctttctggctttgatgaagatgacaagggttggccagagaaccagttggacatgtctgactatagctccagttaccaagatgtagcatgttatggaactttacccagggattctcctcgaaggaataaagaaggttgtacatcagagactcctcatgccttaaccgtcagcccttttaaagcattctctcctcagccaccaaagtttttcaagcccctaatgcctgtaaaagaggagcataagaaaaggatagccctggaagcaaggcctcttctaagccaggaggactctgaggaggaagaaaatgagctggaagctattaacaggaagctaataagttcacagccttatgtacctgtggagtttgctgacttcagtgtttacaatgccagcttggagaacagggaatggttttcctctaaagtagatctgtcaaactcacgggtcttggagaaagaagtgtcccgtagccctaccaccagcagtattaccagtggctacttttcccacagtgcctccaatgccaccctgtctgacatggtggtcccttctagtgacagctcagaccagctggccattcagacgaaggatgcagactccaccgagcactccacaccatcgcttgtgcatgatttcaggccgtcctcaaacaaagagttgacagaagtcgaaaaaggcttggtaaaggacaagataattgtggtgccactcaaggaaaacagtgccttagccaaagggagcccatcatcccagagcatccctgagaaaaactccaaatcactgtgcaggactggctcatgttcagaactagatgcctgccccagcaaaattagccagccagccaggggattctgccccagggaggtgacggtagaacacaccaccaacatccttgaagaccattctttcacagaatttatgggagtgtcagagggaaaagattttgatggtttgacagattcttctgctggagagctttccagtaggaggagtctaccaaataaaacaggcggcaagactgtctccgatgggctccaccaccccagccagctgcattccaagttagagaatgaccaggtaataattccagaggcagccttttgggttctgtgctgtcaatgagtatgtctaactgtatgtcaaccccagaggcccttcaccgcaacaacttggtaggaaagattcatccagttgtttgtgacagcaaagatgagcccacagagaagcaggctcacttcctgcacagctgtctctgtcggagagcaagtctgttttgggaactagaacgcaattgtgaaattataagaccagtggatttttttacctggcacatgggttggtgttgaatgaagtgttcagatggataaggatcaatctcatattcattccctgggatgtttagttaccagttttcccaaagtgttctggtagcatctaccatatttcatcaaatctgtgattcctttgattattatatgaaccattattttatgtatcattaagaaaaaatactgccaattaaactctgtcatatc

SEQ ID NO: 1637 - protein, 1750 aa, Homo sapiens
MSDTKVKVAVRVRPMNRRELELNTKCVVEMEGNQTVLHPPPSNTKQGERKPPKVFAFDYCFWSMDESNTTKYAGQEVVFKCLGEGIKAFQGYNACIFAYGQTGSGKSFSMMGHAEQLGLIPRLCCALFKRISLEQNESQTFKVEVSYMEIYNEKVRDLLDPKGSRQSLKVREHKVLGPYVDGLSQLAVTSFEDIESLMSEGNKSRTVAATNMNEESSRSHAVFNIIITQTLYDLQSGNSGEKVSKVSLVDLAGSVSKTGAAGERLKEGSNINKSLTTLGLVISSLADQAAGKGKSKFVPYRDSVLTWLLKDNLGGNSQTSMIATISPAADNYEETLSTLRYADRAKRIVNHAVVNEDPNAKVIRELREEVEKLREQLSQAEAMKAPELKEKLEESEKLIKELTVTWEEKLRKTEEIAQERQRQLESMGISLEMSGIKVGDDKCYLVNLNADPALNELLVYYLKDHTRVGADTSQDIQLFGIGIQPQHCEIDIASDGDVTLTPKENARSCVNGTLVCSTTQLWHGDRILWGNNHFFRINLPKRKRRDWLKDFEKETGPPEHDLDAASEASSEPDYNYEFAQMEVIMKTLNSNDPVQNVVQVLEKQYLEEKRSALEEQRLMYERELEQLRQQLSPDRQPQSSGPDRLAYSSQTAQQKVTQWAEERDELFRQSLAKLREQLVKANTLVREANFLAEEMSKLTDYQVTLQIPAANLSANRKRGAIVSEPAIQVRRKGKSTQVWTIEKLENKLIDMRDLYQEWKEKVPEAKRLYGKRGDPFYEAQENHNLIGVANVFLECLFCDVKLQYAVPIISQQGEVAGRLHVEVMRVTGAVPERVVEDDSSENSSESGSLEVVDSSGEIIHRVKKLTCRVKIKEATGLPLNLSNFVFCQYTFWDQCESTVAAPVVDPEVPSPQSKDAQYTVTFSHCKDYVVNVTEEFLEFISDGAIEVWGHRCAGNGSSIWEVDSLHAKTRTLHDRWNEVTRRIEMWISILNELGEYAAVELHQAKDVNTGGIFQLRQGHSRRVQVTVKPVQHSGTLPLMVEAILSVSIGCVTARSTKLQRGLDSYQRDDEDGDDMDSYQEEDLNCVRERWSDALIKRREYLDEQIKKVSNKTEKTEDDVEREAQLVEQWVGLTEERNAVLVPAPGSGIPGAPADWIPPPGMHIPVLFLDLNADDLSANEQLVGPHASGVNSILPKEHGSQFFYLPIIKHSDDEVSATASWDSSVHDSVHLNRVTPQNERIYLIVKTTVQLSHPAAMELVLRKRIAANIYNKQSFTQSLKRRISLKNIFYSCGVTYEIVSNIPKATEEIEDRETLALLAARSENEGTSDGETYIEKYTRGVLQVENILSLERLRQAIKEALSTKARHIRRSLSTPNVHNVSSSRPDLSGFDEDDKGWPENQLDMSDYSSSYQDVACYGTLPRDSPRRNKEGCTSETPHALTVSPFKAFSPQPPKFFKPLMPVKEEHKKRIALEARPLLSQEDSEEEENELEAINRKLISSQPYVPVEFADFSVYNASLENREWFSSKVDLSNSRVLEKEVSRSPTTSSITSGYFSHSNATLSDMVVPSSDSSDQLAIQTKDADSTEHSTPSLVHDFRPSSNKELTEVEKGLVKDKIIVVPLKENSAKGSPSSQSIPEKNSKSLCRTGSCSELDACPSKISQPRFCPREVTVEHTTNIDHSFTEFMGVSEGKDFDGLTDSSAGELSSRRSLPNKTGGKTVSDGLHHPSQLHSKLENDQVIIPEAAFWVLCCQ

SEQ ID NO: 1638 - DNA, 5933 bp, Homo sapiens
gcggccgcgctcgaggggcgcgcggctgcagcggcggcggcgccgcgcgtgaggggccgcctaaggccgagcgggcgcggcgagcggccgggcgagcgcagccaacatgtcggataccaaggtaaaagttgccgtccgggtccggcccatgaaccgacgagaactggaactgaacaccaagtgcgtggtggagatggaagggaatcaaacggtcctgcaccctcctccttctaacaccaaacagggagaaaggtaaagcgggtatttgcctttgattattgcttttggtccatggatgaatctaacactacaaaatacgctggtcaagaagtggttttcaagtgccttggggaaggaattcttgaaaaagcctttcaggggtataatgcgtgtatttttgcatatggacagacaggttcgggaaaatccttttccatgatgggccatgctgagcagctgggccttattccaaggctctgctgtgctttatttaaaaggatctctttggagcaaaatgagtcacagacctttaaagttgaagtgtcctatatggaaatttataatgagaaagttcgggatcttttagaccccaaagggagtagacagtctcttaaagttcgagaacataaagttttgggaccatatgtagatggtttatctcaactagctgtcactagttttgaggatattgagtcattgatgtctgagggaaataagtctcgaacggtagctgctaccaacatgaacgaagaaagcagccgctcccatgctgtgttcaacatcataatcacacagacactttatgacctgcagtctgggaattccggggagaaagtcagtaaggtcagcttggtagacctggcgggtagcgaaagagtatctaaaacaggagctgcaggagagcgactgaaagaaggcagcaacattaacaaatcgcttacaaccttggggttggttatatcatcactggctgaccaggcagctggcaagggtaaaagcaaatttgtgccttatcgagattcagtcctcacttggctgcttaaggacaacttggggggcaacagccaaacctctatgatagccacaatcagcccagccgcagacaactatgaagagaccctctccacattaagatatgcagaccgagccaaaaggattgtgaaccatgctgttgtgaatgaggaccccaacgcaaaagtgatccgagaactgcgggaggaagtcgagaaactgagagagcagctctctcaggcagaggccatgaaggcccctgaactgaaggagaagctcgaagagtctgaaaagctgataaaagaactaacagtgacttgggaagagaagctgagaaaaacagaagagatagcacaggaaagacaacgacaacttgaaagcatggggatttccctggagatgtccggtatcaaggtgggggatgacaaatgctacttagtcaatctgaatgcagaccctgctcttaacgaacttctggtttattatttaaaggatcacaccagggtgggtgcagatacctctcaagatatccagctttttggcataggaattcagcctcagcactgtgagattgacattgcatctgatggagacgtcactctcactccaaaagaaaatgcaaggtcctgtgtgaacggcacccttgtgtgcagtaccacccagctgtggcatggtgaccgaatcctatggggaaataatcacttttttagaataaacttacctaagaggaaacgtcgagattggttgaaagactttgaaaaagaaacgggcccgccagagcatgacctggatgcagccagtgaggcttcctctgaaccagactataactatgaatttgcacagatggaagttatcatgaaaaccctgaatagtaatgacccagttcaaaatgtggttcaggtcctggagaaacaatacctagaagaaaagagaagtgccctagaggagcagcggctcatgtatgagcgggaactggagcaactccgccagcagctctcccccgacaggcagccacagagtagcggccctgaccgcctggcctacagcagccagacagcgcagcagaaggtgacccagtgggcagaagagagggatgaactcttccgacaaagcctggcaaaactgcgagagcagctggttaaagctaataccttggtgagggaagcaaacttcctggctgaggaaatgagcaaactcaccgattaccaagtgactcttcagatccctgctgcaaacctcagtgccaataggaagagaggtgcaatagtgagtgaaccagctatccaagtgaggaggaaaggaaagagcacccaagtgtggaccattgagaagctggagaataaattaattgacatgagagacctttaccaagaatggaaggaaaaagttcctgaggcaaagagactctacggaaaacgaggtgaccctttctatgaagcccaagaaaatcacaacctcatcggggtggcgaatgtattcttggaatgcctcttctgtgatgtgaaacttcagtatgcagtccctatcatcagccagcagggggaggttgcagggcgtctccacgtggaagtgatgcgtgttacaggagctgttccagagcgtgtggtggaggatgactcttcggagaattccagtgaaagtgggagccttgaagtcgtagacagcagcggggaaatcattcaccgagtcaaaaagctgacatgtcgggtaaaaattaaagaagcaacggggctgcccttaaacctctcaaattttgtcttctgtcaatacacattctgggaccagtgtgagtctacggtggctgccccggtggtggaccccgaggtgccttcaccacagtccaaggatgcccagtacacagtgaccttctcccactgtaaggactatgtggtgaatgtaacagaagaatttctggagttcatttcagatggagcactggccattgaagtatggggccaccggtgtgctggaaatggcagctccatctgggaggtcgattctcttcatgctaagacaagaacactgcatgacaggtggaatgaagtaacgcgaagaatagaaatgtggatctccatattagaattgaatgagttaggagagtatgctgcagtggaacttcatcaggcaaaagatgtcaacacaggaggcatctttcaacttagacagggtcattcccgtagagtacaagtcacggtgaaacctgtgcagcattcagggacactgccacttatggttgaagccatcctgtcagtatccatcggctgtgtaactgccaggtccaccaaactccaaagagggctggacagttaccagagagatgatgaggatggtgatgatatggatagttatcaggaagaagacttaaactgcgtaagggagaggtggtcagatgcactcattaaacgacgagaatacctggatgaacagataaaaaaagtcagcaataaaacagagaaaacagaggacgatgtggagcgggaagcccagcttgtggagcagtgggtagggctgactgaggaaaggaatgctgtgctggtgccagccccaggcagtgggattcctggggcacctgccgactggatcccacctcctggaatggaaacccacataccagttctcttcctcgatttgaatgcggatgacctcagtgccaatgagcagcttgttggcccccatgcatccggcgtgaactccatcctgcccaaggagcatggcagccagtttttctacctgcccatcataaagcacagtgatgatgaggtttcagccacagcctcttgggattcctcggtgcatgattctgttcacttgaatagggtcacaccacagaatgaaaggatttacctaattgtgaaaaccacagttcaactcagccaccctgctgctatggagttagtattacgaaaacgaattgcagccaatatttacaacaaacagagtttcacgcagagtttgaagaggagaatatccctgaaaaatatattttattcctgtggtgtaacctatgaaatagtatccaatataccaaaggcaactgaggagatagaggaccgggaaacgctggctctcctggcagcaaggagtgaaaacgaaggcacatcagatggggagacgtacattgagaagtacactcgaggcgtgctgcaggtggaaaacattctgagtcttgaacggctccggcaggccgtcacagtcaaagaagcactttccaccaaagcccggcacattcggaggagcctcagtacaccaaatgttcataatgtctcttccagccgaccggacctttctggctttgatgaagatgacaagggttggccagagaaccagttggacatgtctgactatagctccagttaccaagatgtagcatgttatggaactttacccagggattctcctcgaaggaataaagaaggttgtacatcagagactcctcatgccttaaccgtcagcccttttaaagcattctctcctcagccaccaaagtttttcaagcccctaatgcctgtaaaagaggagcataagaaaaggatagccctggaagcaaggcctcttctaagccaggagagcatgcctccacctcaggcacataaccctggctgcattgtaccctcaggaagcaatggcagcagcatgccagtagaacacaatagcaaacgtgagaagaagattgactctgaggaggaagaaaatgagctggaagctattaacaggaagctaataagttcacagccttatgtacctgtggagtttgctgacttcagtgtttacaatgccagcttggagaacagggaatggttttcctctaaagtagatctgtcaaactcacgggtcttggagaaagaagtgtcccgtagccctaccaccagcagtattaccagtggctacttttcccacagtgcctccaatgccaccctgtctgacatggtggtcccttctagtgacagctcagaccagctggccattcagacgaaggatgcagactccaccgagcactccacaccatcgcttgtgcatgatttcaggccgtcctcaaacaaagagttgacagaagtcgaaaaaggcttggtaaaggacaagataattgtggtgccactcaaggaaaacagtgccttagccaaagggagcccatcatcccagagcatccctgagaaaaactccaaatcactgtgcaggactggctcatgttcagaactagatgcctgccccagcaaaattagccagccagccaggggattctgccccagggaggtgacggtagaacacaccaccaacatccttgaagaccattctttcacagaatttatgggagtgtcagagggaaaagattttgatggtttgacagattcttctgctggagagctttccagtaggaggagtctaccaaataaaacaggcggcaagactgtctccgatgggctccaccaccccagccagctgcattccaagttagagaatgaccaggtaataattccagaggcagccttttgggttctgtgctgtcaatgagtatgtctaactgtatgtcaaccccagaggcccttcaccgcaacaacttggtaggaaagattcatccagttgtttgtgacagcaaagatgagcccacagagaagcaggctcacttcctgcacagctgtctctgtcggagagcaagtctgttttgggaactagaacgcaattgtgaaattataagaccagtggatttttttacctggcacatgggttggtgttgaatgaagtgttcagatggataaggatcaatctcatattcattccctgggatgtttagttaccagttttcccaaagtgttctggtagcatctaccatatttcatcaaatctgtgattcctttgattattatatgaaccattattttatgtatcattaagaaaaaatactgccaattaaactctgtcatatc

SEQ ID NO: 1639 - protein, 1724 aa, Homo sapiens
MDESNTTKYAGQEVVFKCLGEGIKAFQGYNACIFAYGQTGSGKSFSMMGHAEQLGLIPRLCCALFKRISLEQNESQTFKVEVSYMEIYNEKVRDLLDPKGSRQSLKVREHKVLGPYVDGLSQLAVTSFEDIESLMSEGNKSRTVAATNMNEESSRSHAVFNIIITQTLYDLQSGNSGEKVSKVSLVDLAGSVSKTGAAGERLKEGSNINKSLTTLGLVISSLADQAAGKGKSKFVPYRDSVLTWLLKDNLGGNSQTSMIATISPAADNYEETLSTLRYADRAKRIVNHAVVNEDPNAKVIRELREEVEKLREQLSQAEAMKAPELKEKLEESEKLIKELTVTWEEKLRKTEEIAQERQRQLESMGISLEMSGIKVGDDKCYLVNLNADPALNELLVYYLKDHTRVGADTSQDIQLFGIGIQPQHCEIDIASDGDVTLTPKENARSCVNGTLVCSTTQLWHGDRILWGNNHFFRINLPKRKRRDWLKDFEKETGPPEHDLDAASEASSEPDYNYEFAQMEVIMKTLNSNDPVQNVVQVLEKQYLEEKRSALEEQRLMYERELEQLRQQLSPDRQPQSSGPDRLAYSSQTAQQKVTQWAEERDELFRQSLAKLREQLVKANTLVREANFLAEEMSKLTDYQVTLQIPAANLSANRKRGAIVSEPAIQVRRKGKSTQVWTIEKLENKLIDMRDLYQEWKEKVPEAKRLYGKRGDPFYEAQENHNLIGVANVFLECLFCDVKLQYAVPIISQQGEVAGRLHVEVMRVTGAVPERVVEDDSSENSSESGSLEVVDSSGEIIHRVKKLTCRVKIKEATGLPLNLSNFVFCQYTFWDQCESTVAAPVVDPEVPSPQSKDAQYTVTFSHCKDYVVNVTEEFLEFISDGAIEVWGHRCAGNGSSIWEVDSLHAKTRTLHDRWNEVTRRIEMWISILNELGEYAAVELHQAKDVNTGGIFQLRQGHSRRVQVTVKPVQHSGTLPLMVEAILSVSIGCVTARSTKLQRGLDSYQRDDEDGDDMDSYQEEDLNCVRERWSDALIKRREYLDEQIKKVSNKTEKTEDDVEREAQLVEQWVGLTEERNAVLVPAPGSGIPGAPADWIPPPGMHIPVLFLDLNADDLSANEQLVGPHASGVNSILPKEHGSQFFYLPIIKHSDDEVSATASWDSSVHDSVHLNRVTPQNERIYLIVKTTVQLSHPAAMELVLRKRIAANIYNKQSFTQSLKRRISLKNIFYSCGVTYEIVSNIPKATEEIEDRETLALLAARSENEGTSDGETYIEKYTRGVLQVENILSLERLRQAVTVKEALSTKARHIRRSLSTPNVHNVSSSRPDLSGFDEDDKGWPENQLDMSDYSSSYQDVACYGTLPRDSPRRNKEGCTSETPHALTVSPFKAFSPQPPKFFKPLMPVKEEHKKRIALEARPLLSQESMPPPQAHNPGCIVPSGSNGSSMPVEHNSKREKKIDSEEEENELEAINRKLISSQPYVPVEFADFSVYNASLENREWFSSKVDLSNSRVLEKEVSRSPTTSSITSGYFSHSNATLSDMVVPSSDSSDQLAIQTKDADSTEHSTPSLVHDFRPSSNKELTEVEKGLVKDKIIVVPLKENSAKGSPSSQSIPEKNSKSLCRTGSCSELDACPSKISQPRFCPREVTVEHTTNIDHSFTEFMGVSEGKDFDGLTDSSAGELSSRRSLPNKTGGKTVSDGLHHPSQLHSKLENDQVIIPEAAFWVLCCQ

SEQ ID NO: 1640 - DNA, 65780 bp, Mus musculus
  misc_feature (1)...(65780): n = A,T,C or G
tccctgcctcccttcctctgctctttcttgttttgaagagacaaaacagcatcatgttgcctaggctagcttcacacttatatgtagttgagttggaattctcagtcctctaccttccaagtgctgggattatggacacaccctacagcatccagttcagctgtatgagttatgcacactattggccattctcaaactgtgggttgaaggaccccttcacaggggttacctaagaccatctgcctatcaggtatttgcattataatttataactagcagaattgaagttatgaagtagcaatgaacatgattttatggttggaggtcactacaacatgaggagctatgtcaacatgaggtcacagcattaagacagctgagagacactgttccaaactaacctgtaagttaagggcagctagaaagcacttgttttccagaacaactgaaaacacaggcattgctggataaaattagcttgaggagggaacagtgagtgtttatctatgtgagtagaggggctacatgtctgggaaagggttcaatttggtaaactaagggtttgagaaggttgttatggactgtatcttatacacgaagctaagtatctcagcagaagtgaacccaattgatcttagccacagcttacagctcttccttccctgaccttgtgaggggcagggagggggtggtccagtgaagggtatctcgctttgaggcctgaaaaccagggtcctggccttgcttatccagaccagggaactgacccccagttcatctgctgcaggattgagctgggccccccaggacatctcctcatctgtgggccctggactcagtgcccaggcttgggaaagagaccttagttaccttgccttcgaactgagggtttgtctcccagagtcttggtgagattccccgataacctcaagtctcttagcctgttgttggtctgcactactcctggtctgcactactccagaagagtgggttacacacatgcgaactaggggtcagagcacccactgtaatagcatcacgtgtcacctactggcagctttctgtggagaggaaaagccaagggtacatttgtaccctgagtggctggcaactggttctgtgaaaagctacccaagtccaggcctgggggagtccatacacgtgggtgtccatttactaagtccgtggattccgggtcattttatgcttgcagtttcagatcaatgcaggggcttacagtgtctcctggggagggaggcagcactgagaccatcaggccaacattcccaaccaacgtctgaggccccatatgtgtctttgtggccaatggtcctgtgagaggtaagaaacttgcttgcagagatgtgttccgggagagggaagagacggatgctgccctgttcagaccaggacctggtacctattctagtctcctgtgcactggtgaaagtgcagctgcctctgcttgtcgcagttctgtgtggcccagagagggtgtgagcagccaccctcccacaggctgccgaggaactctctgtgtcagtcttgtggagtttcagctggtctcaaacttgctttgtagcccatggtgattttgaattcctaaccctcctgtctctggctctcaagagctgagatgtcatgtgcatacaaccatgtccagtttatacggtgcttaatgcatgttgggtaaacaccataccaactgtaccgactgagctacatccccagcccagctgaggaacttttaatcttcctatgtccaaggaaccctgtgcctgtttcaggggcttaactaaccaattgctgaccagctataaagctacctaacagaatctattcttcctcccgttctttctctctccccatctccctccttctagatagctggtatggcactgctttgggcatccttagttactgacagctcctttcttcctgttactcacactatgagtgtctcaccttaacctcatcctttaagtacacacctgctattgagccctaaatactttttgcttatggaggagctgggcataaggaccgaggagtaaaggttgggtccaaatggtggtaaaaataaccatttggcaggatttaatgtctggattggataccgagagcagaggcaggtcctggagtcaactcgggcttcagagtatattcctggctgacgctgtgcagctgcaccagaacaatgcctgaattatggtctattcaaggcctgatggagtaggggcgtggccaccccttttatgccttaggttttatagatcactctctgtttatacatggatgtatttttttttctcacagtgtaaagctttgggggggggggcgcaccagttgtaggctttgcctgaagggcagacacatcagagctttttgttataggtaggggaaaacagttgctttcacttttccacttgaggctcaaatgtgattggaatgactgccagagtcaccctgtaattatgccctctgtctggggagctctcataatgccacttcaccgagctggtattgcctcttcggttcagtgctaaatgctctgtgggctaagatgactaaactgtcaactattttctgaaagccttttttctttttctttctctttttaggtcaagaggtaaagagaagtctgactaattagctactccattcccagcgttttacatgcatgacctagttggagtgaaagacccatccaaggtcaatgagcttgacttgacacacagcagactctttacacacaggcttgagcagcttgtgcctacttcccaagacaagaagcagcacaggtatgatcatgtcagtttgggaaacattgttcactcctgacccgaatcccattgcagtataacatgacctagaaagctttcttgggggggggggaagttttcagagaagggactcacactcagcatttctctcttgttggtttcttggctgcatttttccttagagaaatttaggggtagtgaggtaggaattaaaatttccatacataaacagacattgagagaactggctctcattgtgcaagagctctgggctggaaatcttggatgagcagccggaggtttcatgctcttgtttttaaatggatcttctcttttctcttgattacaaatattgtgaataatctccgtaatgtgtatgagctatcgaggccctttgagaagaaataaaaagtgactgcaagctcatcacccccaacacaaccgcacaggcagcccctggaagctttgatcttcctgtctacactgtcattctgtggatgtttagttgttggtcctggaagctggcaacggtgaggcctgggaagatggctcaggctgcaaagtgcttaccttggaagtgtaaggacctgagttcagccctcagatcttacatgagctggggagctggctcagtaagtaaagtgcctgtcattcaagcatgagggcctgagcttagacccctaacatggcagcatgtctgttactccagtgttggggggaatgtgctacccatggaagctcattgggtagccagcctagcccagctgatgagctccaggtttagtgagtgactcagtcttggagagtgggagtagagatagggtctagagacatggctcagtggctaagagcatttgctgctcttccagaggcctagggatttgttcccaacatccacatgatggctcacaagcatccttactccagttctagggagtctaacaccttcttcaggcctctgaggacactgcatgcacatacatggtacacacacacacacacacacacacacacacatatatatgcaaaacattcatatccaggagttgagtacatacctaatattgacagatagcttctccatcatgtgtgtgtgtgcataagtggcaccattataactcgtgaccttattggaggaaatgtgtcattgtggggtgggctttgggaccctcctcctagctgcctgagagacagtcttcttctgactgcagttggatcaagatgtagacagaactctcagctccttctttagcaccatgtctgcctggatgctgccatgcttccctccttgatgataatggactgaacctctgaacctgtcaactagccccaattacatgttgtcctttgtacaagttgccttgatcatggtgtctcttcacagtaatggaaaccctaactaagacacataccatataaacacatacaacacacaagcacacacacacaaaactagacaagatatcatcaccttgtaatcccagtgatggaaaggtgaagactgttggctctttgggattcactggccagtcaacctagcgtactcaacaaattccaagccagtgagagactctgtcgaaacagaaaaggtgatctgggcacatacctttaatcccagaactcagaaggctgggagcagagcacatggatttctgtaagttcgagatctacatagagagttccaagccatcgggactacacagtgagactttgtgtcagaagagggaggagaaagggcgttcagcacctgaggagtgacacttgaggttgacttctggcctccatatgcatatgcacatgtatgtgcccacacacatatggacacgtgcacacacatacacatgaagatgctctctatccaagcatattggaagtaacaggagggtctctaccttctgctttgttatcccctcccccctcctccctgccaagtcatcattagccttcctagtaagtagggctggggaatctcataggcagaataggggcccaggaaaggagtctttcctcctgggagtgggtggcctcctgtgctgtgaactgtgagtaaaaaaaagaggaaaagccctctggagggacagctgagagaagcctgagggcatgtggccttcctccaggagcctctgactctatgaagttattcaggttccttgagattgaatagtataagcaggccttcatttccacagtgttacagtttgaatctgagatgtctctcacaagttcatgtgtttgattcagtctttgagacagagtcccatgtagtccaggctgtcctcaaactcaatatgtagccaaggatggccctgaacttcccttcccttctctacttctatagcactgggattacaggcctgtgtcaccatgcatagctagttcatgttaacattcctatttcatatctggtagagttatttagggagactgtaaacctctaggaggtgggagcaaggaggaggaagtaggttggccaccgggagcatcccttggaggtgtattacccttggctccctacagtcacaccctccctgcttcctcctcagccacaataggaaacactctgacacattcttactgctatcatggactgatgactgcgtcccttgaaacctttggcccagatagattcccctctccccaagttgtttctgtcaggtgttctgtctcaggaacacacagctaacactttggtgttatagatctgtttggctattggtcatatgtactccagggtgaaataattagcaaagatggaatatgggtatctacatttcacttcccagagaaccctttgaccctaggtcacttccttgctcttttcctgatgaaaatattgtataatagatctactgctgcctaacaaatcacccagaacctagtggcttaaaacggtagtaggggctaggagctgactcagtgggtgactagagtcccacataaaatccaggttgggcggttcacatctgtaaccccagtgtaatttccagtgagggagtgagacaggtgcatccctggagctcactggccagccagtccagctgaaatagtgagttccagggtcagtgccagaccctgtctcaaaaaataatgtggctccaggatgttctgtacggtctggaaaatgatctacaggatagatatgctttctgttttcagtgagtgagtagggtaagcatatttcaagccaaattaaaatagcaagatagatagatagatagatagatagatagatagatagatagacagatagatagacagacagacagacaggtagataggtaatagatagatagatagatagatagtaaatagatgatagatagacagatagataggtgatcaatagatagatagatagagagagagagatagtaaatagatgatagacagacaggtgatagatagatagatagatagatagatagatagataggaaataaatgatagatagatagatgatggaggagctggtgagatagctcagcaggtaagagcactgactgctcttctgaaagtcctgagttcaaatcccagcaaccacatggtggctcacaactatccataatgagatctaatgccctcttctggtatgcctaagacagctacagtgtacttatttataataataaataaatcttttttttttaaaaaaagatagatgatggagacataaatgatagagagatagatgatagatagatagatagatagatagatagatagatagatagatagatagatagattatatttatttgggtgttgaaaacattcagcagacatcagctgggactacctccggaggaagtcggctggagtttacatagagagccagagttaggacccaatgttgtctgctcaggtgaggcttccaagtgaaagaacaagaagctgcacactgagagttggcagcatcaaatccagagctcacgacggccagcagacagggactggaaaagtccggggtggtgggctgaagttcctggttgagtttctctccatggctgaacttctggtatctcttgccctcccaggcacttttacatcatatgatatacaatagtgacctgttgagaacgctctgacttctatctgttttcggggacaaaatgtttctacacttgggctgtttggctggcctctcctccttgtcacagagttttatggggcagcttgtcccctaaaaagaggccttgaaggacacttgatataaatacccttgggtctaagtgggggccaacctcctctcaagcctgacaacttgaatttagtctctaggactcatttgtggaaccgatctccgcaaagtgtcttctggcctctgcacacacactatgcacatgtgtagctgcacacaaacacacaaaataaatcaaagtgtaatatgaaaggctaggtggagagtaataaaggaagataccctatattggcctctctctatatatgtgagtggcgtgtgtacatgcatttgtgcacacacaggcacacacacgtacacgtcttatacacacacatacttagactatctctgtgcacgcacgtgcaggtgcacactagtgaatctattagctctgctttgtttgactgctcaggaatttgggtgtggcttggctctcgatgcagtcagatggtggctgggataagtatcatccaaggtagctcattcagtcagtcagtcggggcaagttggtgctggctgtggtctggggtcttggtttcttccacataggtgtctcttcagggctgcttggacacctttccaacatggaggtgattataccctgccccaacaaaaactgcagcgctgtgtatgacctaggaagtccacgtatgttccctctgcaggttgaattggacactagtattcatggactattcacagtggaaggggctatgcaagagttgatcagggggctggagagatggctcagtggttaagagcactgactgctcttccaaaggtcctgagttcaattcccagcaaccacatggtggctcacaaccatctgtaatgggatccagtgcccttttcttctgtgtctgaagacagcgacagtatactcatatacataaaataaattaaaaaaaaagagttgatcaggatgtagtcatcactggaccactgtgggggttcttttaaagggtgtcatccaaagtagaggcattgcttctccccactcaagaacaagaggacattaggcttcagttctggaatttttctttttcccttttcccttttcttttttctttctttgtttctctctctctctctctctttctttctttttgaaatggagtctcattatgtggccttggctggcttggaactggttatgtaggccagtctggtttgagtttacagagattggtctgcttcaacactctgagtgctgagtgcggggattaaaagcctgcaccaccaagcccagccctttgatttgcttttaagccagaggaactcttcctcctctttctttcccacctgctctgaaactcttctctccattcttcccacctggcctgtcaggctagagttcgtcttcacgtcctcaactgatcctgtgttcctggttggcctgggtcccagtcctgatgtgatcccacggctggcctccaggctcaggatgtgccagcagagggacaattgcactgtgctgggccacaggtgctgtgcttcctggacagagctgaaagcatctgggtggccggaggctgcctcctcaggggacacggcccttcctcgggggacacggactttcctcaggggacacggcccttcagggagtgaagcaaaaggctctgggccaggcacagacagctcagcagtggagattcaggcagggactaagattctttaaggacttgcctaggctagacctcattctttacaatgcctctaacatacacacctctccattttatggaagaagaatcgagaaccttgagcagttccatcatatacatatacactcatgcgtgcatgtgcacatacatatacatacatatacacagaaaatgttaactagttaaaacaagcatttagaggattgagcagatggttcagtccaagcatgaggaagtgagtgcaatccccagcactcatgggaaaaggctgatggaggcagagacagaagggtccctggcagatcgctggccagccaagctagtcatgttgattaatcccagggtgaatagcaataaatgccaaaataacaacaataataacagtaacaacaacaacaacaataataataataatgtggactgcaactgaagaagacatttagctttgacttttggcctccatatgcatgcacgcacacacacacacacacacacacacacacagagagagagagagagagagagagagagagagagagagagagagaattcaagattagttgatgcaatggtgcacagtagcgatcccagcatttgaaagactgaaacagtgtaaattcaaatgagtttggacaacacagagaatccaaggccatcctggactacttggtgagactgtctcaacaaaacctaaaacaaacacaaaatttaggatagattaagaagacattactgaaatggagtcaaatttgcagcctatatgcatgttaggctaaccccctgccccattatttattgacttcctgagataatgaggggactttcccctgagggctgcctggaagaggcagagcttagccctgctggggcagtcctcatcagccagataaccagaagttccctcaggtctcttggagtcaccgtgaaacaatgtcactggtggggtatgtttcttccaactttctgtagtcaccaaggtctgtctggcctgggtcacctgtcccctgatggatcctcttccccatagacaacatcaatctcaggtctgctcagaggagcccaccaaaccagatgcaggaggtgtctttactcagtgacttgttaaacctaagctcagccctggctgctactgcagaacctggtagggctgagccaggtcgagtaaaaggattacgctttcgaagtcatcccaccacaagcagaccaggcccttcaggaccagcagaccaacctcctctcacgttgcgtcatcgctacggaaatgcaaatgtgccactgttttgtgaccaatattgcaaaaattagaaagaggaagttgggttttgttcttgcatgagttcagccctgggggagatgcagactggtcttggaagaagggtgagtggagattggctcctgggatctttgcagaatcctacagtgtttgtcttgcgctgtgaaggggcttcgtggcgggtggtaggaggttactagaaaccaaacaggaaccattcaagggagacagatgttttcaaagcaggaagttgctgtggcacggtagcggtgtctcttttcatgctgttgtctttcagtggctcgtactggtgagaagatagggttgctatgggtgggcatgagaagagttcgcgactacagagtcctggacgtgctattggcaggtggggcacagctcacacttaggctatgggcagtctgtcggtgactactgtggtccctgggaggcttgggggggggcacagatccaaggctgaccccacccagtgtgccttagtggggaagaaagcatgtctttttctgcttaagcagaagaggtggtcccaggggatgatttaatggaggctaggccttcgcatcccatgtggttctggaatcttctccagtctacagtttagatattaacagatatgtctgtctagctgggcactgctaggaaagaaaactaagccctcaaaggactccttgggacccccagggcttcgcctgggcagctctgggtagtggtacagccacttaggaggctggcagccatagagcaggcgcacggcagcatggatagaatgatatgattatgataacactatgatactatatgccatgcagagtaagcagaggcatatttgaaaagccggactctaggacctgtggggagtgaggcaggagtcactgtcattgtggatgacaagtcacttgccatttttctgggagtccctgagtgctagggaggatgagcagctatagggggatagggaggggactctggtgagaaagaatgccagggacagggtgataggcagactctgccttgatttccctttctgtaaagtgaagtcagaatgatgccaagccacactgaggtttagagcttacgcagctctgcctcattttagattggtcctacctagccgggggtggtggtggtagtgatggtagcacacgctttcaatcccagcatttggtagacagaggcaggtggatctctgagttccaggccagcctggtctacagagcaagttccacaacagcagggccacacagagaaacaccatctcttggggggaaaaaaaaccaaaaacaaagactaaaattgttagccatttgtgtgtgtgtgttgaggcatgtgtagggaagccagaagacagtctcagatgttattctccaggacctgtctatctggttttttagacaggttctctcattggcctagcttgacacgtggtttactgagactctccccagcccccatttgggtgagagatgaaacaggcacagagcactctgccagctcatcccagcccccccccccccgcccaaagtctgtgaatggactagctggtccccacataagctctctgagctgataacacacactgtgcttggtttgggggtggggccagctctggcaaggacaggaggaagtggtttgtctcaactgggctgccacagaccccctgaagcctgcttctgcccctgcaaggtcgcagtggagactggcttctgtttatagagggatctgcacctcccaatgtgcaggggcctgagagccacactgaactctgcatacagaggtcgagagcacattatgagatcagtgctgaaatgggcttgtcttcagaagcctcactgccgagtgagaaacctggccctgccgctcagtgatgaaaagcagctccgtgggttacaacagggactctgggtatcttgatgtgtgctccggaagtttctgccgtactgcgacttcttatgggacctgggtaggctgattgtgatcttacacttacagatagaaattgtgattgctccattgtgtctgtctccattgtaaagcgactgagaaggaagtcaaatcagcactgggcagatataaaacccagatgatgctgtttttgtggactgttgtagcaactacaagaaggctctgagaccgacgtgtgcccaaaacaatgaacaaggacagaagaatgcacaaagctggtcactgctgtggtggcctgtctctgcctgcctctgggcagggggacagacagggggcagggaccaagctagtccaggaaggaaatgagaaatgagaagggccatcgttcactgtggccacttccctctgtgtgcaggatcctctgcaccctagatatctctaggtgggtgggggttggatatgacgatctgggctagtgcagaggaatgcaataagccagaccctgtgtaaaatgggggcagcaacacgatggactgagggcaaactgactgccacctggtaacgtatcttgcaccacagtgaggctggcacatgaccatactaaggtctggcctgctcttccttctggttttctgactctggtgctaggcagcctctcccatgaccattaacaggtggtctctgtggcatgtgggcaccagatactgactttcccttaaacagctgattggtgagcccctgtctcaaaaaattcctcaaatgggcctgggcccactggctgcatctacattggcattggacttgatttcctgtctcttccccgcccccccccccgcccaacacccacccctgtgatccctaccatggagagtataccccacagggcctggtttgaaactccacacttgctgcctttcacctgctacaatctcattgcccatctctaagcccctagaaatggggggaataatgaaatgttcaggtcctgtaaagtgaactgagctggacactcaggtcctgtaaggcggggtgatctacactggaaatgaaacctggagtctgaggacctcaccaatactgcacagagaacacacagacaattggcatagcaaaagggcgactttctgggtggcacgcacacagagcaggctttcaatcctaatgcaagggtactgtgtctcccccactggctgggattcagcctcacagtctttctcgatatttaaaatttgttgcaagttggcgggccttcatgttaatggccacctaatgtaagtagatcattctctgatgaggggtgaaggccctatgggtctagtaagtcatcaggatttgcctttttacaatatctacttgggaaaatcatagcagtagattcttccctaagccctatgtcatgcctagccataggtccttgattgaatgatgccaggtatgggtttcatcttatggaattgaccttaaatccaatcaaacagtagttggtattcccattgatgttcatgccactactacaacattgagcatgtcttgccaggccagtcactgctggagctcacagggtgcagttgccagtgactgatggttacttcccacctctagcagcaacttaggaactcccagtactgagagtaacttagtgctacaacttccaggtcagtacctgcttttttgttgttgttgctgttcctacgcgttttatgactcaagtatgtgatctcttcagcaatcaggtcttaccatcaaattctgtagggtaaccaataacatcagccggtgtttggaggtatttgaggtctcattgactaacagctctaaaagaggtaacccattcctggcactgggctttaaacttgatagcctgtagtgcccagtaagggtactgaaaccccactatagggtagctccattctgtctgtctctgtctctctgtctgtctgtctctctcattctctctctctgtgtatgtgtttcaaagaagcttgtacagtaggctttcatatgaaggtttttgaaactttagtgttatttatcctttcctgtgctccctcctctaccctgtcttcttcacaatttaatccttcctgttccatcatatgcagccctaaatgtgacatttctatcacactccttccttctaagtatccaggcagaaggagccaaaagatggtcaagccagaggcaacagatagctacaaggacacagtgtctaccggacacagcagggcagtcgtacagatgaaatcacaatggttgtgacaacatatacagtatctgtgcaagcaaaagacagacaaatcccagcgtggatggggtggtggggacagagtcccacccctagttgaggagctattgacaattggtaattgcttggagaaagacagtcagttttctttgaaactgtagccccaggaaagctgacggtgctccagtggaaagccatatatccattaatatatgagcagaacaaattgagcttagtgggttaaaatagaaagaagacacacagctgggtgagtggagagtgggggtgtagatgtgggaggagttgggggagaagggtgtctgtgatcacaatgcactgtgtgaaattctcaaagaactaagacagaatgagaggaaaacattcagttgcagagaagatgaacggaatgagaaaaggggtcctctgccctggccattacgctttgggaatgaggaagggcctttatgtagacaaaaaggtttcaaaggtaggggagattacaaaacagcattgcaaaggtcgaattcctgtggtcattttttgggatagaaaatatttaagttccttgtaaccattaccctcacgtggacaatcagctcttgggaagtgtccagtcaggttctataaggtggaatgagatggactctcaggtcccgtagtgggttagccttgacagtcaggtcctatgaggcagtatgacctgattccatgtcctgttaagtaggtagcctgttttcttaggtcccgagaggtggagggtgtggttgctcagatcctctgaggttacctggatactcagatcttgggaagtgggatgacatggtgacttgggtctgtgaggtgacatgacttggacactcaggttctgtgaggtagagcaacttgtatttactatgcacagaacccagaccctgtgttctgcctcatgactgacctccaaagtcttcccaggtttgggtgtcagcttttagcccctgacatttgggtttgtgttataacacctgacacttacgtcatggtctggtcttcctgtttcagttgtcacctgcatgatgatgtatgagcctggccaaagagggactgctttacgatagaatgctacctgccatgatctcaattacaaggaacttaaagtttatgtttttaaaatttgcatgcagtgaaagcataattctgcatgtgaatgtagccatattagcaggattctaaatgttcactggcacgttggttccaagtccaccattgatttgctctcccaaaacatctagtgtgactggctgggggtcacgtgataaaatgaggctcctcttttaattgcacgccagtgaggagaggaggaggaggaggagaaggaggataacagagtgtagggaggaacagcttgggtgagggctggatggggtctgaatggaggaagagaggagcatgggaatatgcgggagtcatgggatgcctcttagagggaaagcctgtttaggagccaaataaaacaggggtgatcgatcctattctctactgaggaaaagtttgtgcagagcatctgagggggctcctgggagaatatcagcgctaagggggtcagggtagagtggttgggtggaccgtgatgtggaaaagtcagtgtctgtttcaggctaccgtgaagaccttgctcttctgtcttgcttcattgtgttttacaatggaaattgccaaacataaccccaaatagagacagaattatatactgagccaaagagcttgttctgaaggcagcctgaacttacataaagaatggaattctgggggtctgcaagatggaccagcaagcaggtaaaggtgtgttgcctgatgacctaagttctgtcctcaggaagttcatggtggaagaagagaagagacccacaatttgtcctctgccctccacatgcgcacacacattcacatgtacacaaacacacacactcacacacatgtgcacacatacacacatgcacatgcatgtatacacatgcacccatgcactcacacacacacacacacacacacagagacacttatatacacacagtatacaaaaaatattgagtaaacatgcaggtaataagattaaatgtgaggtgggaagatgactcaacaggtaaaggcacctgcagctgagtctgacaaactaacaacagtcttgtagtcctggggcctacatagaagaaggagagagtcagctccacaaagttgccctctgacttacacttgttggctgtggctctctctctctctctctctctctctctctctctctctctctctctctctctctctctctctgtctctgtctgtctgtctgtctgtctgtctgtctctcacacacacaaatgaataaatatcatagtaattttattttgtttttaagattaaatgagttaggtgtggcaaggcatgcctttaagcccagcattcaggaagcagagcttgtgatcacaagaaaaagttccagatctgacttgccaacacagccacccctgtgtaacaggtagctctgtccttgttgttcaccagccctgatggccaaccctcatccattcctggacctgtgattctctgccaatctagtttcaggccaacattattgctgtgcttagtacttaatttctctttgtcctgccacagctgaatgggtagggatctctgtgtgtcacagtggcctagagttgtttcaggtgacagtaacctatcagatgggtatgccatgctgcctgttaggccttccaaaactggacagagtggctactcttgggttgttgtatgcttccccaggcttcaggaatctgtgtagaaccatcactgtgtcccttctgaggaagctgagtatagcccttaatttctaggtaataaggcatataaacaggaacatgctacattcaaaaccttagtgctaacaatggtccaagggttgcattgccccaaagatggatgtattggctggagatataccacagaagtaaaatgacaagctagcatatgtaaggccttggattccatccccagtaatcacacacacacacacacacacacacacacacacacacacacacacgatgaatataatgaaagtagccaaactgcattcagtttgtggtgagtaggctgttaagatacccagtgagatcttagaggattagcttgggatgagagcaaagggtgtctgcacaggccgtcctatgagaccagggttgctgctggaacctctggtagcttgatcctcccgggtatgcagggaactcgctgtgtttccccttcctctgtctctggatctctcatctagggtggtgtaacccatgaggaaaccatcccctcatttagctaaagtcaaatgctgaagctgtaataatctcagggccaccaggatggtccttcatgctgtgctaccatccactacctctagcctcatccctaggtgacaggttgtacagttgggccttggtcttgtagaggaagactggggagcagggggagggctttggcacaggaggtcaacactctgtgcggaggcttcagaaacaggctggtgggtgttccttacctggctcagacctctgtgggccacactcctcctggttctctacaaggagtaaattcatgtgttctgagacattggcatcttagtgtgaatccctaaaacccgcctgccccagccccccagccttggttcaaaagaaactgttccttcagagcatggtggcttatgcctgtaatcccagccttgaggagactgggaacttgcttgggttataggaaggaagaccctgtcgcagggggcaaaaaaggatgcggtgttgtcttctccactcagcttgccctcatgcgtctgccctgctcggaggtcccactgatcccccaccccaattccaaggtgtgagaccccccaccccccactgtgttctcatcagatgaggaactagagttcttcctaggctgagaacctaagaggagcactcatccctcccaggcacctctgagtcatgaggtggcattaatctcccagggggctggtcatcccaccaggccatgactagggcaccctggggcttgctccttgatgatatggacttggtgggttttcaatgtgaagccatcacgttaagccaaggagaagccaaataaggacacaaagtggcttgcttatagttattctgtcattcttagatataggcctaatacatttcaatgttcctatgagtcaccttcaactgattgaggttttggtttggtttttttccatcatgactatgtatgtctggtattcaggaaaaggaactaaaaaaaacaaaaaaacaaaaaaaaaaacaaaacaggcaaggtctatgtagcttagactaacctctaaccacccatatcccatatagccaaggttgatcttgaactccctactctcctcccttattacaggggtgtaacaccaggtacagtttatatagtgttggggactgaacctggggcttcaaacatactaggtaagctctctaccgactgagctgcgtctcctaagcctgcctggtaatttttgactagatgtcagccacttgaggtttttactttgctgggtcccagatattttagagttttcttcaaggggggagttcaattgtaactagtttggccttcctgttaagtggaatggcagaagtcactggaaggttagtgatctaccacccctgagacaagaccctcctgagtactggaccttgcaggtctgcagttttcaggatggacagcggtcacaggcaaccttgccccgtgtggcgttgcaaatgctccttccagtcctctgagggaatgttctttgtccaggctcataatgtcccctctcatgtgaactcaacataggagcatctctgaggatctctggggtctttctcagtaaagctttcttctttgtagagctctttcctgtcaatgccagtcagcctttatggtcagctgggcatcttctcacttctgtgagcccactgggctctccttacttctccctggctcacaaatagtctctaggcagtaatctgaggcaagaggtctcatcccatggttcccatctctcgagggcttgtggggctttgctgtctgatgtatggtgtctcatcaactttcctttatgtagtatattgaagcatatggcaaaccactttgtttatgttttgtttttcaagacatggtttctctgtgtagctttgagtgtcctggaactcagtctgttgatcaggctggcctcaaactcacagagatctgtctgcctctgcctccccagtgctgggactaaaggtgtgcaccaccactagctaggtttgtggcaaaccacttgtaatgggcattttcttctttatttttttgttggttctgctaaaaataaaccttgattctgagctaaggcactgggaggtggaggcaggaaggatttgacattctaaaggccagttgaggctacttagaaggtttagcaccaacctgaactgcacgagaccttgtctcaaaagcaatgaggtgggaagatggcttacttggtaaggtacttgaatctgagtttgagtccacgggactcacgtaaaaggctgggcgtggccaaacacccctgtaaatcccagttgctggtgcctggaaaacgaaagatccccagggcttgctggctagccagtctaaccaaactgagcttcaggcttagtgagaaaccatgaatagcaagaagatggagaatggctacaggaggcactcagcattgactatggcactcacaaacacagacacatgtcttgaccccgaagcatagctcctccccggtagtagggacaagcgagcctctactctgcctggttgccacagcctctgaccactattgaggctgagctcagctcacattccgtacagagcttttttattgctgtgtcatgtcgacttctggaaacattcagtttatcttccaatgctatgagaagaatgtagacaaacatgtattttctgtttagaagtcagatatttctgtccagcaaacctgctaagaatgttaacaccaagtctagttactgtttagcttgctactggcttggagcatgctcaacacacttctttctagttgaatttaatagctaaatacacttactggccagctactacagatgtttggacacatctgattcattggccttgaggcacggttatatagtaacctgaataataaagctatttcctttaaaaaaaaaaagtgacactagccaatgaaaatgtcttcctgtagtgactttggagtcactgacagaaaaacccatcctaaggtagtttagccacaagaaggttagctcactcaggagcctatgtggatgggaggagctctgttctgtggcctattggctcccagagctaggggaactcgaccaactctgcgcgtggccggaggcaaggcagtcagatgtgtagctggaggccaggagtctacacccatggttctaactctgctctctggtgaaggaggaagtgaggagagaagctgcggaccggcgagtaccagagagtgagtgtgtgggagccaatactgagtgttcagtgtgggaaccgagtgtgatgactgtgtgtgtctggtggggccactgtgtgagcgtgtcactgagtgtgtctcgtagagtgtgaatgtgtgtgagttaccaccaagtgaattagcatagctgctgagtgtgagtgtttaagatccttactatgtggggactctacagtgagtgctggcaatgtggctgggtgactttgtgggctagggaggacgctgatgtgctgagctctcttaaacatccctggctctagggcacagcttacggcactggcaccatcctagccttcttgggtcccacaattggtcttagaggctgacagtgggccattctgtgctctccatctgccctgaggaagcctgtgtcctgccctgagtctgctatggtgggcggaggcctaagacatattacttcagctcattcctttagaactggggctttggtctgctccaaacaccattgtcttttgtgtgtgtgtttttttttctagcaccttctaaacaacttcacttccaatggtctgggcaagacattttaatagattgttctagactctgttgggcaattccaaagccccggccggaggaagcaggtgcctgttcatcaatccctgacagcctcattgggcaacagtgttaggcaacaggtaagtgttaccagcccccctcgcccttttcctctgaaactgcaccttattgtcaaaatgatttcaaagactgtctacctcccttttgtccaggctcacctttgaccctcctcggagttagttattgatgaattccttgaactctaagaattgactcttgactctctgtgtggtgtgcaagtgcaaatgccgtgtgaactacctgtagtgatcaggacctaggcttcctcctttggggaagatcagggttgaaagagccttgagggggacacaaaagtgtgtcgtaaatgggagcctccccccttcggctggcggtttcactgttcatgaatttatttttaaatatgttaagcagctcatagcctcatgttccaagaactccacacactgttccacgggattacttgtgtgtgtacggaggtggggtgcgcccaaacatatgtgtgcgtgtgtgtgtaggtcatagatcgtgtcttcgtctcccttcattttatagtttgtggcagggcttgtcactaaaagtcattcttttggctagactggctagccactgagctgccaggatctagctgtctccacggcccccacccctagcacagggatcgcaggcacggtcaccaccacggccagcttttaaccccagtgctgtgtgtctgaactcgggttcatgcttgcacaggatttccccactgattccccaggcctaggattacatttggggggggggttggtttttcgagacagggtttctctgtatagctctggctgtcctggaactcactttgtagaccaggctggcctcgaactcagaaatccgcctgcctctgcttcccgagtgctgggattaaaggcgtgcgccaccacgcccggctctaggattacttttttatgtaagtaaacaaccttcctctttagagaaaacattccctttgccattccctcaaacctgtcttgataggacccaacggggtgttgtgaagtagtatttcccacacagccccagcctgcccggtctgattgaggctggtgctctgagggttgccttcaacgactgtactgagctgagagctccttttccccaacaggaattccttgggcagcctcctagcagagccccgggagtttggctgtgaagatggaattgggtaggagcccctcgacaccccaagaagaagccatttcccctcttggagtacttggcactgggcccagcagctccccactagggaagcttcaagcccttcccatcggtccaggtgcccaccgaggggctcatagcagctcagccccagcaggggacagctccacgcgggagccaagtggtgccatgaagatccccaacagagacagtggaattgacagcccatcctccagtgtggccagtgagaacttcccctgtgaggagagcagtgagggctctccaagccctgccatcctggggctaccctctgagacggcttcggacagccgggtcccacaggacaacccccaggaggaagaagatagtggcatgggtgaggagcctgaccccaaggtcaccctgtttaggcctcaggaggatgtcagcttgactcaggtaagccttcctccctctacattcaacttggggtacatgggcagtgctggagatgtgtgctgggtaacacccacaccctgtgctcaggaaatgttgcccatacactcattccacacgaggggactcctggggcggagtcgaccagaaaagactcggaggagcaccctgataccttgagtgtacttgatacttgaatgtaatttcttcctcattggggtgtgtgagagagagacagagagagagagagagagagggagagagagagagacagagagacagagacagagacagagacagagagagagagagagagagagagagcattattcatgctcctttagaaggttggtagaacttaccattaaagtgggacattttggcattattgatcggtgccttattcattgcttctttcccagattctcacatttcttcatgatgcaactgtctttatagccacacactcccgaggattcacttttcctaggctgtacagtctgttagcacacagttgctcgttctctggtagcccttttttattttcacatcacaagttatgccaacacgccctcttctgcttctggcttaggaaccggtctcctctctttctctaaggccccttagctgaagttgctgagttttcttgagcttttcagactttggcttggttactcttttgtaattgtttttccattctttgtcttttatctcagctctgatcttccttccttagtctggcctagccttgggcttagttagcctacacttgctctgctagtttttcaatatatagttagcttgttggaagattttgattctctctctctctctctctctctctctctctctctctgtctcttgtgctggagatggaacccagggcatggtggataaccattgagctacgttcccaacagtggttttttttttaaatttgactttttaagtgtctgtgtgtgtgcatgttcacatgtgtgggggcatacacacgtgtgcgggtgcaaggacaggtgtgaggaaggacaggtgtgggtgtgcatgtggaggtcctaacgcagggcaacttcctggcccactctcctctttgtttattgaggcaggatctctctttgaactcacagtgcttgctttccggcggagctaaccagtttgccctgggatcccgtctctgcctcctgaatgcatgagtattagtttgcctgtgtctgtggattttctccattttcttgctttattccattgtgactgaaaaaagatattttgaataatttcggcttttgttttgcatttgttaagacgagttttatgcagcacacggtctgccctgagcagtgttcctcgtacgttacactgttgctgggtgaggcgttccgtaaggcatcattgcatgtgctgttctcccaggcctggcttttcataactgatcttctgtccagatgttctgaccaccgcagagagctgggtaccgaggcttctagcgacgaattcgttgcctgttagtcttccatgcagtagtcaccgtctgcatcacttacggttatattttcttggtgacttttaaaattatcttttaacgctctctgtagttacttttaatttttaaaaacatggttttctcctcagtgtgtggagggagggggtggggcagtcagagaacgactctgtgtaagactcttccccttccaccaagtaagactcagagattaaactcaggccatcaggtttagtggcaaacacccccccccccattttgtttgctataaataaggcattttgggggaggtgttgctatttgcatgaaacatcttctcttgtctttccccacttttatcctgtgcgcccttatatgcagaaataccaactgagtctccagtgaataatgtatttaggaaggaggaggcatggcagtgtgcacctacaatcctagacttagacgtttaagttcaccctcagctacacgggaagttggaggcctgtctgagttacaggagagagaggctgactcacctcatacctcaggctgacccggaacttacctcatagcctgactgtctcagttcagtcctctcgctgggattacaggcgaccagcaccacacccagcttcagccttctttggttcatttgatctgtgcgtgttttttcctgtggagtttagcatgattacatgcagagtcattactgaagggggaggatgggaaggccactcgtaaggttgccgtctgtcgctttcctactttctcttcccctctcaccatctttctctgtatttctttcattgacttttgtactgacataggttgattctttccattttcacttttcccttcctatatgcatatccataaatgttttacgtgcagtcgctgttgttgttactaaaaaaatgtaaagctacatttgatctgatgctggccaagctctggccttcctcatcccctcccctttgttttaccgatgtctcaaattcacctgtatgctattggaccattgaagatagatttaacgcttctcttattgtttctgagattgtgtaacccagggtgaccccaagtgaatgcttctcctgtcttaggctcttaagtgattgcactccaggcatgtgccacccacacccactttatgtggtgctgggactgaacccagagattcctgcactccaggccaggactctaccaatgcagccacatctgcagcctcagcctgtcatttctacttgaaggacaccttctgcctttctccccctgccacacacactcaaggatggatttatttatttatttatttatttatttactgttggtatatgtgtgtctgtgtttggggtaggggttgcatagatcaggagaaaacatcaggtggccttctccatcactctgggtttcttccttttagtcggtgtcttaggcagggtttctattcctgcacaaaacatcataaccaagaagcaagctggagaggaaagggtttattcagcgtacactttccacactgctgttcatcaccaaaggaagtcaggactggaactcacacaggacaggaacttggaggcaggagatgatatagaggccatggagggatgttccttactggcttgctctcttatagaacccaaggctaccagcccagggatggcaccacccacgatgagctgggcccttctcccttgatcactaattgagaaaatgccttacagctggatctcatggaggcatttcctcaagggaggttcctttctctacgataacttcagcttgtgccaagttgacacacagaaccagccagtaaagttggggtctattcctgaacctggggcccatcttttctccattaggcttaaagcaagcaagccccagcgatcctcctgcctccatccccttagatctattacaggtgtgggcaagacacccggctttgaacatttgtgctggtgtctggactcagtcttcatggttgcacaactagaactcttaactgatgaaccaggactcattttactggtttttttttctttaagtatgggtctactaattataaactccctcagcctttgcttttttaaaaagtttttttaaaagtctttaaaattctattgtattttatgtgcatggatgttttgcccgcaatatttgtatgggcaccacatgaatgcctggtgcccacagaggtgagaagacactgttacaaatggttatgagccaccatgtggggactgggaatcaaactctgttcttctgcaagaggagcaaaggttctaactgctgagccatctgccccatcttttcctagaaaaagtcttaatttctctgtctttgaaggacagtttcacctgataccatagcatcacctgacaatgttttctcttaggcagccttaacagcagtccattctctctgagcttcaaacatcccttgtagaaacatctggaaattccatggaagcccgtgaaagtgagaccggctgcttctgttatattgctctcttccctttaatattgcctacgactcttagatatttatttctatcatagggtgccttggtgtaccctcctttgtgttattgtcatagggtccctctgtgtagcccaggctggcctctacctcaccactctcccacctcagccttgtgaacaccaggcttataagcatgaactaggtggccggttccttattctacgccgagttttgtgaacgtgtgtggtcatttctttcctgagattgaggaagtcttcagttatcatttctgcaaatgttttctgtctgttaccctttgtgactcccatatggagatctacccaaaggtgtcctgaaaagcctttagaatcccaacacgtttcttcattctttcctttctccactggctctgattttaagtgacttctttgggagctagggagatggcttgtgggttaagagcactggttgctcttgcaaaggacccggagttcggttcctattatccacaaccatctgtaagtccagttccaggggatatgacaccctctttctggcttcttcaggcatcaggcacacacctggaatacatgtatgcatgcaggcaaaacttttatatacataaaataaaaatgattaaatcttgaaaaaagaggcaggatgtggcactggagagatggctcagcagttaagagcactggctgctcttccagaggacctggtttgattcccagcacccacacaatagcaccacagataaccttctgtaactccagtcctgggaaatctaatgccctctgctggcctccatgggtactgcatgcacaggtgcatagacaacaagcaggcaaaacacctatccacagaaaataataaagaagagaagaaagatcacagcactttacctgtctgaatgatttctcttcaagtttgctgattctttcgaccctctctatgagttctgcaggctagtcaactccagaatgtccgcttcattctttttaaaggtcttgtttttatccctgttggtggtatcccttgttcctactccagttcttgattttttttgagctcctctatgacaaatatatatttttcccataaggaaactcatagatcactctctctctctctctctctctctctctctctgtgtgtgtgtgtgtgtgtgtgtgtgtgtaggtacacatgcatgcatgtgttctaatgtgtacaacctgatgccatccattgcataccatcccttgggtttgtttgttggtttgttttgagacaatgtttctcactgggatctgagtaggctggccagagagcaccaaggatctatgtgtctctatctccccagtccttgaattacaatagcatgccaccatgcctagctgtttatgtaaatgctgagggatgaactcaggctcttgcgcttatgtgacaaggactttactgactgtaacaatccccttgagccacagatctgggtttcttttctttctttcttttttaatttttaaatttatttttatgcacatacacctgcaagccagaagagggcatcaattcagatttgggagctggacagatggcttagcagttaaggacactggctgctcttccagaggtcatgatttcaattcccagcaaccacatggtgactctccagctcccacatctatttctttaggatcaagtttgggagtttgttttctttctctgattggcccatattcttctgcttctatgtacggtttataggttttgtttcttgcttttagttttggcatttgaagagaccatctctccagattatgtgctagcttcagggagaggaaacctttacccatcagcacggctgtggggtgggggtgggtctcagagcatcttgcctgtggaaccagaactctaatgtgctgctggattttgctgtcagtggcttttacactccagttctgggtctttctgctctcaactcacagaagagagagtccacagtcccaaatgccctgggtagacctctgaggagccagacttatcagtgcctgactgagatttctatttctgccctgcaagcctagtagtcccagtgtgggaaggcccctggtgtgggaggagtcctggtgtgggaggagccctggtgtgggaggagcacaggtattttgttatctgccaaacaactggattaagacaggcatctcccaccttcccctgggattcccttcttggaatatatttgtagatactgtacctgctcagtttgtgtctacagtcttcatacatgatgtggtccgtatattgttctgtgtctctatggaggacccgcaacttgttgacctaatgtcttgttgatgtcactttgcgtgtgtgtgtgcatgtgcaagcatgcacccgcacccacattactggtaatggaaccccaggtttgtgcatgttaggcaaattttcttctgttgagctggacctcagctgtgcagtggttactatggccactcattagttagaggtccagaaatgtaagagtcacacctagactgtagtaactttcaggagacaggcaggaacagttgtgctttttattgatctgtccttgaaaatagcatttaagagaccaagtgctacatctgaaatccaggtgcctctgtctgctctctctgccccctgggcatcctggtgtgccccgggtagccttgtttggtgcccctccccaattaagtggcttcccctctctctgcagtgctctgacccacagaagctgcttcatattgcccaggagctcctgcacacggaggaagcctacgtgaagcggctgcacctgctggaccaggtaatcaagaggggctgggaatccccttctgtccacaccggaattcaaaccacctgttcctgtaccctgtttgggtattgtgattggagcaggactgacaaataccaaagttctgaggaagtgacctgtggcctgaaagcacgttgtccacagtgctcacggctctggggcagaagctccgtatgttcactttgggggacatctcttcatgaaggatgcactgaacacatgaatggatgctggggtctggggaggatgtctcagtccatcaggtggttgccttaagtgcacaagagcctgagttcgattcttagaactcacctaaacatcctaataatagtggccaatgcttgtatctcagcattcgggagatggagacagagatacctgaagcttgctgtccagacatccctgtcttatctcctgttttatcaactcggaaagattaaggtttggtggaaagatcttatccaaataaacaaacaacaaacaaacaaaaaccaaggtgaatgatacctgaggaaggcacctgaagttgttctccagcctccacagtcaggtgcacatccatggccgcgtgcacgtgcacacacacaaaccatccgtagctgggccagcgggtgctctgcatccctgctcatgaggaagtgggaagatccctaccacaggaaatacagccccaggagaacaaggcctgctccggtgttgggggtggggtgtgggggtggaggtggcttccgcctgcacctcacaagcctgagaaggtgaggcagacagatgtcccaacccatcctcaggagctgctcctacctcagccctgatcctcacctgcaagcgagctttcagtaggacttaaagctggaggatgttctgatgttcagtaagaaaacctaagtggggctagagagaggactcggtaggtaagagggtgtcctagggttactgttgctgtggtggaacaccatgaccaaaagcaagttgcaaaagaaagagttcatttggtgtacacatagtccatcagtggagggagtcaggacaggaactcatagggcaggaacctggaggcaggagctgatgcagaggccatggagggtgctgcttactggcttgctctccatggtttacttaacctgctttcttagagcaccctgaccatcaacccacggatggcaacccatcagtgggctgggccctcccccttcaatcactaattaagaaaaatgccctatggtaggatcttatggagacaatttctcagctgaggttccctattttcagatgacactgaaactagtcattacaaacattgaagagtattttctgtataagtctgtgtttgaatctcaggacccatgtaaaaaagtgcacacttgggggctggagcaatggctcagctgttggaggcactggtggatcttcagaagatctgtctgagtttggtctctagtgccaacacagggcttcacaaccatctgtaactccagttccagaggctctgatgcacaaggcacacacgtgggacacagacataactcacacaaagcacataagcataaagtaaacagatccttttaagtgcacacctgtagccccagcaccacagaggtgcaaaggcagaagggtttgctgggatttgatggttgctgacctagctctaaaccctgcctcaagagaatgtggtgaggagtgacagcttctacacacacatacacaggtgtgtgcactacacacacacacactacacacacacacacacacacacatcacatacacactgtcctatacacatagaaaactacacacacatgtacacacacacaggtgtatgcactacacacacatgcaccacatccactcacacacaccacacacactcaacacacatacaaacacatacactacacagacacacgcacataccacacacacacacacacacatactacatactctcctacataaaactatacacacacatgtgtatgcattacacacacatacaccacattcattcacacacacacacacacacacacacacacacacactacacagacacacatcacatacaagaagcccaagaacccacttatgtggcaggcgtatgagtcactcacactcagtggcctctctctgctcaggttttctgtactaagctgacagaagcagggatccctctggaagtcaccaccggcatcttctcgaacatctcttccatctaccgtttccatgggcagttcctcctgcccgagctgcagaagaggatcacagaggagtggtaagcctggtccatgcccacccacagggaccctaaactccagttcgcctgcctggaaccctggcaggttcttgggggtggggtccttgtcatggaggactgggtgtctcccttcccttccaggcaaccccagctccatctcttcctgggtcgtgaccataactgatgtctcttgagtttatggatctagatgagatttgacatctggagggggagcaatgcatgatgctgatggcttcgtttcccctctctgtctctctgtatctacctttgctcagtgtgtggctgggtcactttgtcaatcttcagaagctgcagaacaggttgcactagagctgggtgacaaagtccatggctggcagcacaggccttctccttccataccctggaggccctaccataagctcacagaggattgcctcagtcctgtaatgatgacacacggcctcttgccttgcatctccaattgttcaagttataaaatcaaaccctgtgcacagtttcataggagtaccaagtggtggctttgtgtctgtgcctttttttcccctttgttttttgtaattacaaaggataaatctccaaaagagagttctaagatcggaaattatgacgatggtttttcctgtggaggtgtgaacaacatctattcacccaagacagggcaccagttatagaccaataaataaataaataaatatccaatcccagcttagttgaaacagtgagttttctgaggttacttaagcactgggcttcctggagtgacttaaaggtggccacagcagggaaggactcacaaaagcggcattccaggagttccctcacagcttgagggcagcctggtggagtggaaaaatgtctcctatgcaattgtgagtgcttatatggccttgggaagaggtcctgtgaatcttgtaagtttcaggaacttcctgaagtttcgatcacttcctgagcctggtaggttttacttcctgagttttatggagcctcccttctggaggggatgttttaacatagaggaaataactgtacaatcatgattatgatgtttgcttcctagagtttatttcttcactcagtttactcagaagttttcatcactggtcctgccaagtcctcttctctccctggctttggtggtagtgtgtagacccaccatttctactctgtcacttagaatgacacttcactgaccatctttgataactgtggcctgccgctcaaggacagcactattgctaagtccttctctatgggcactggtccccagcctgtgctgtcaatgtgtttagagacagtgtatgtgggggtggggtgggggatgggggaacattcagagagagtgaccaatgtgcttagcaccataggacaaggcatcagcaccatgccacctagattcctcatccagtgaccgtgcttctccacacagggatacaaaccctcgcctcggagacatcctgcagaaactggctccattcctgaagatgtatggcgagtacgtcaagaactttgacagagcgatggggctggtgagcacttggacccagcgttctccgcagtttaaggatgtcatccacaccatccaggtagtatggcatacacactattttttttttaacttcaaaaagtttttttttttttttaagcatagtgtcttagtttgggttttattgctatgaagagacaccatgaccaagacatctcttataaaagaaaacattgaattggggctggcttacagtttcagaggtttagtccattatcatcaaggcaggaagcatggcagcatacaggcagacatggtgctagagaagaagcatagaggtctatatcttgatctgaaggcagccagaagaggactgtctctcccatactgggcagatcttgagcataggaggagaccgccaaactccaccccccacagtgacatacttcctctaacaaggctgtatacatcctccaataaggccacacctcttaatagtagtatttcccaaagaccaagcatattcaaaccaccacagacaaagtctcaggcaaggcacatgcctttaatctctacactcagaagacagaggcaatcaaatctttgtgagtttgaggccagaccagtctatatagcaagttccagaccggacagcactacatagtaagaccatgtccaaacaaaacaaagaacaaaatcaaaaatcccaccaccactacaataacaataatacaaagtctctagatctggctggctttggacttcctatgtagccaaggatgaccttgaactctccagtctccacctcctgtgagctaggattacaaaagtgtgtacctccacacccagtttacagagcgttgggcattgcaagcctgcgtcagcatacctggggttttctacatgggctctggggttgcgttcagttcctcatgcttgagcagctacactgtcccccaggccagccctctggagacactatgacactgaactctcacataagcatgagcctcatctgtgctgtggagatccatggacagctctccctccagagagcagggcagtgttcagcctgagcacaggccactgttcctgtccacatagagcagaccaggttcttgggtccagcaggtcctagggtgacaagacacctctggggttgggatgacagtttcgtgcattggctacctcagtactacgcagtccctgaacagtgggtgccacctggggatggtttctactaaacacacctaaggttctgccccttggcctcagcacaattcagacgttctctgccaagacctgatcagtgtctactgacactgctattgcttcggtacctggagggtcgaatctggggcaggtctacggtgcacaggctgacccacaatagaaaattctcctccataaatgtccacagctgagaagcctagacctggacaaaatgggatcaaatgaccatctcgtttcccttggtctctggagggaaatgcctttgcttaatccaaagcctattttaaattataagccttaaagaaattcagacatttaccaaggatttgtaaggtgatcaacttaaggctagagaaaggagctgagagcctgagtttggatgtctaacacaaggtaacacaggtatggtggcatgtgtctgaaccctagtacgtggggctgagggtaatcatggagacaggtagttctgggctgatgagcaagcctagatgagatctagtttcagccagagatactcatgcacacagcatacccaggagtaaccacacaaagaaagcctacagacatcacattctgccccacttacctttatctctaagcacatacgatggccgttgtctttggaaactcatctgcagacactgccgccctcatcaccaagtgtgatggagagtgtctcccacacgcccacgtggtgactgaaatcaggaaccccacacgactgtcacagcactgtctcctcacagcccccacactcaccagctatcccggttgatgcacttgaaatatttctttgccttttttctctttgtggttcataagccaaactaggacacacactgttctcattatcaggtcgagtccttccctcgaggacaggctctgcccttgtcctcttgagggaattggctactgcctcttggttttgggattatctgtggtttatccatgattcaatttaggctgtgcctccgtgtgaacttcgctggagcaaaatctcccctccttgccccccccccctgcctttattcttaagtttctagcagggagatgctttgaagccctgggaatagccaggaaatagcttgcttgaaataatttgtctgtgtgatgtatgcctgtgtacataggtgtgtgtatgctcatatttgcatatgtgcatatcgaggtcagatgtcagtgttgagtgtcttctatctcttcccatctgatttttgaggcagagtcttttgttgtgactctgctaggctaactggccaatgatgtgtgattatctctgcctccccagcactggagtctcaaatgagcacattacactcagacttcttttaaattttattttatgtgtatgagtgttttgtctgcatgtatgtttatgaactgtgtgcatgtctggagctccagggtggttagaagaggatgtcagaaactctgaaactagagtttcctatggttgctagtcatgtagttgttagaattaagctttaaatgttcttaacctttgagccatctttccagcaccaatactcagatttttttttaacttaagtacaaacttcattaaaaaaaaaaaagccaggggtggtagtgcatgcctttaatccaagtacttggaaggcagaggcaggctgatctctgtgagttcaaggccagcttggtctatgaatagagtccaggttagccagggatctgttaaacagagagactctgtctccaaaaacaaacaaaccaaaaaaaccaaaacaaaatgaaaactcattgtttagggactgagaagattgctggtggctagtgtttcagtgtaagtacaaggactggagtccaaatccctagaccctgttggaccctagactgttctgggtctatctccaacagaagttttgttctggggcctgaggaaggtgtgggtgtctgggatcctgaagttgctagggggcagggcagtggagagcaggagaaacagtgggctctctcagctgtcagcaggcagaagaaccaggcagcatggcagaaagaccaaggtgagcatagaggtaacatattgctagcattgtctcagatagacttgtgtgcaggatgaaggatgtgaactgctgctgtctgcagcaagaaggtgctgaagtgtggcaagggccgggggagctggaatctggagggaggaggggtggtgtagagagccagggacagtgcaggggtagggttgcagcagtcacctgttctctctgtcattcatcatgcagggactctgcagaaggacagccagcagcttctaggcatgaggactgatactggggaagttaggcacagttagcctccacctgacagagaggagataggacctgaagggacgagatagaatatgagtcttaatgactcccatgggaggaggcagtatcttgaccttgttttcttcaacccaagcctgcccacccagagatttccagttcctctatcattaggcacctttgagcctccatttccccagctgtaagatgtggtctatgtcaatcatgtcttgaaaaccaggcagcctccagggactgtggtggccagtagcaggggcaagatcctatggtgaccctatgtgtgctctctgtccacccagaagcaggaggtgtgtgggaacttgacactgcagcatcacatgctggagcctgtgcagagggtcccccgctatgagctgctgctcaaggactacctaaagaggctccccagggatgccccagaccggaaggatgcagagagtaagtagaggtagctgaagggctggggagagggggtctctggagaagactgagaaccctgggctgagacacacatgggaaggcagaggagagagagatagagacagacagaaacagacagagatagagacagagacagagcgactaataactaagaaagtgatttagtcttttcctctcacctgggagaaccctatctggggaaggcactgccaaacactggctccatccagacctgaggcccagcaatgggcctattttaggagtcatgaccaatgtaactggccagcagcacagggctgggtactgtgtaagagagttgggggtctcacttggtgttatccccagcaggctcagcaatggttctgggccttgtcccttctttgtgccagatctctggagcagtctgggcaccctgagaaaggccaagtgtaggagcaaggtctcccactggaagatggcatcatcaatgtcagcctctccagtgagaacttgctacattaccacgttgcccagggctcactcagttctcctcacgcagggtccctggagctcatctccacagctgctgaccactccaatgctgccattaggaagatggtgagttcagattgctgcagggaagcaaagactatgcagggagagggaggaggtggaccatataagcaagtgccttcacccctggttccaggtgggccccgtcagtgagcacatgtataccaagacatgccaagtgcatatcccagtaccctctaataataagtacatgctcagcctctctctgtacaaaccaggtaggtttatgcccannnnnnnnnnnnnnnnnnnncccatgcatcctgtgctgtttggtccactagcatctatgcatccatacaaagaaggccagcctgacctacctacttttaggtacacaagtagaaatcacaactcaaagaactggacacctgagggctagcagattcagccccagccaatgttgctattgtcaaagtccctacaggctcggttctacgttgattagtgttgaattctaaccaagagttagagccacaagctgttaactttatccccattgtacctttggccattaggattccccaaccaggcttgaggaaagtaacatgtagattagcccagtctgggtcatagggactcaactgattcctgcatgcttcagtttccttgtctataaattggggatagccatgacatttatttcgcagagtatgtgtcagaattaaataattaaaatatgaatggcgtagaacagcctctggcacatagcagcagaggtttgtgacttattagtttctgagtaatgagcttctagttaccctttcatacccagctcaaatgtctccctgtgttttcctcccttttcactggaagttatttcattgttacagtggactctgggtgatggttgcagagcatgtctttgctcacctctgggtccatggcagttccctaggttttgtgatcttgcaggtgcctgatcttgtgtctcttgcaggagaaaatgcacaagctcttagaggtgtatgagcagctgggtggggaagaggacatcgttaacccagccaatgagctgatcaaggagggcagcatccagaagttatcagccaagaatggcaccactcaggaccgacacctcttcctggtgagccagccagccatggcacagaacttcctcatctgccttctcagaccctggatagaactggaaagattcagaagcacaaggaggaggttcttctgtagccttccagataggttttttgggctatctcttgctaatgacactgcactggtttctgcaagcatctaatatttatgttccatatatccagcatttctattcttttttatctacctcggttgcaactagggagtatccagcaaccaaaatatagagaattgtagccaaacatcaagatctcaactgtccccagaaccatgctctggtttagagggagagaaaagaaaggaaggagttatagtgggagatccattcaagtaccttacatacaggaagagacacagtttctctttctatagctacttttccccctacctcctccttttcttctccttcctcctcttcttcctcttcttggttcttcccaaggccttacatttgctaggcaaatacctgatcactgaattacactcataggccagcctctattcttgaataagtagctatatctttgcaagtttcctttttttttcacattcacacactcaggatatgtttattattttttattttttatgtatataagtacaatgtagctgtcttcagacacatcataagggggcatcagatcccatttcagatagttgtgagatgccatgtggttgctgggaattgaactcaggacctgtggaagagcagtcagagttctaaaccactgagccatctctccagctctgcaagtttctatgacatacctagccacagtttcttgtctgaataatagcactacatatggggttcatcttgtggaatggagcttaaatccaatcagaaagtgattggtcactcccatgacattcatgcctctattgtataatcgggtgtgtcttgctgggccagttgttattgtaacttacagggttcacatctgggtatgatgtatgcttatgtctctcctctggttaaatgtatagcatctttcaacactatagaagctatccagtggggttgaagcttttgggtcagttctgacttgaattctccatgttctatgactaaatatgtggtatttgcagcagtagcatcttatcaccaagctctggagggtaaccaagaacattagcagtagcctgtactatttggtgtttatgggatctcaatggccaacaactccaaaagacataaccctttcctggaactgggattttgtttgttagtctctggtatctagtgggaccattgctgtccatgataggctgggaatatgcttcttgagcattgtgcttaaaggcgtgtgtgcatcttttaaaattatatgttttactttatgacattaaataaagtttatatgggtcccttgtgaggggctccctgtgacaccactccccatgacatctttcttacagttcaacaatgtgatgctctactgtgtacccaaactgaggctcatgggccagaagctaagtgtacgggaaaaaatggacatctctgatctccaggtgagtgggtccctctctcctcttacgccttggaaggggtacaataagggataactttgaaggccacctctgaggctcagagaattctgagacaacatcttggtcctggtatactagccttgagtgggcagtgttccccatggtcttagagtatactttctgccaagtccctgatgacctcaggttgaagagaataggaggctaagactaaagtttacagccatgggggtcacatagacacaaggtaggctgtcacttcgtgaggacaggacttaagacccagttaaagatctagaagtgaaactcgggtgataaattcagaatggagtgtgagcctattcttctggcctgtggttttgtgctcatggaagagtgttaaatctgagagcctacaaggacatgacactactccatcaattctgtctgggtgcacacctttaaactcaccacgcacctgcccatgtgggctcaagcacctgctgagggacagagtcaaacatcttatatgatcttcatccctcccaaggggtgtgtggctgtgctaggaggcaaagccctgcatgctggaagggaaaggctgggtcagggctgcctggggacaactactaaaggaggcctgatgggcaggtacatttgccaagcagcagtctaaacacagagcctgaggcccaactctgtatgggcaagaccagtggtctgctcttctcctgagcctcagaatccccacgttatagatctgggagcctgtagagtcactctgatacttccatgggataaataaataaataaataaataaataaaaaaccactgattcacagagcttggatgtgtgttaaagaccagctaacatggtgacctgtactcatttgctctgttctgtgttctgtgttctacaggtacaagatattgtgaaaccaaacgcagcctgcacgttcatcataacaggaagaaaaaggtccctggagcttcagactcggtatggcacagcagctgcagctgcaggaacatctttaaccagagactatagcggatcgtttcttttactgaatgcaataacctttcaatatattcagtgtgtgtatgtgtgtgtgtgtgtgtgtgtgtgtgtgtctgtgtctgtgtctgtgtctgtgtctgtgcgcgtgcacatgtgtgcgcacaaatgtttaaatcaaagatgggaagatgtctcagtaggtaaagagcttggcacatggcacgaggacctgagttcagattcctagcactcacataaaaagccagacacagcagtgtgtgtttgtaatcccagggctgtggaggcggggagccaggcaggttccggaggctggctctctagccaccctagtagaattaatgagcccaaagttcagtaagaagttctgtatcaaaaagtgagatgaacagtgattgaggaagatgcacaatatcggcctctgtcctctacacacatgcacacacatgaacatgtatatacacatgctcaaacgtggctattacaaacagcacgtatcttggttatggtttctactgctatgactgaaatcaacttatggagaaagggttcatgtcgcttacacttccaggtcacatccaccactgaaggaagtcagggcaggaacctggaagcaggaactgaaatcgtggaacctgactacttactgccttgctccccatggcttgctcagcctgctttcttataggacccaggactgcctgccaatgggtggcaccacccatagtatactggctgttctcacatcagtcattaagcaagagaatgccccatagacttgcctacaggccaatctgatggaggcgcaccctcaaataatctgatggagatgctccctcaactaatgttcctcttcctagataattcccctcgtctcagtgcaacaaaaaaaaaaaaaaaaaaaaatgtccaggacagcagtccttcaccttgctgttttcagtcagtgtgtcaggattcatcctatttcccataacatttttcctgctttccttcacatatttcccagaactgcacgatccccaccaatattattaactggaaccaatgagacagcttagtgggcagaagcacccgctgccaagcctggtattgtgagtgccatcctttggtggcaccagctggtagaaataaaaagtcaactcctgggagttgcccactgacctctgtaggtatcactcacacccctacatatacacaaaaataaatgaaataaactaatgttttttttttaaatcaataatcagggatcaggtgtggtggcacactcctttaatcctagcacttagaaggcagaggtaggtagttctctgagttcaaggccagcctggtctgcaaagtgagttccaggacaaccagggctacatagggaaaccctgtctggaaaaaccaaagtggggaaaatcatcacagggtcccatgctgacagcttgagtctcatttctgcaaactgtgcagactgtgaacggtccccatgcttagccttttgtgcacatatgcacagaggctttttctgcccctgagagatgtacttctgagaggagctcctgatcagcctgtggtatgtctgctctatcaggtcacattatcctctgagcttgagctctcattggctgtgtgtaggaaatccaattggttacgttccacctatggagtgagagctttgtaatcacctgccagggtccagggtgatgttcatctgcaagatgaacctggccctaatcaggccacacatgttctgaacactgaaactacctttccagcccggagttgcagttacaaggcagtgagtggctagggagccactcagggcgtatccaaggatggatttctgagatactgattttgtctttgtaggacagaagaagagaagaaagaatggattcaggtgaagcttcacaatttgtcctctctctctccctcccatggatcaaagcgtctgggggcctgtccagcaagtcctctgctgctgagctacagcctcagctcttgtgtttttgagatagggttttgctagtaaccgacactggcctcaaaccctcaaccctcctgccttggtatcctgaaggctgggattcagatttgcatcactgagtatggcttacatcctgatattattttagtatgactgcttcacgttgggccacatggcccaggaactcttccctaactgcctgtcttcatgtctcaagggaggcagtgaccatgggtgccttcatacatgctttcgggttccacaagcctttcaatgcatttaattgtttgagtcccttttccacaagtaagggacaggacagggccatgaggggcctccgactaggtgttgtcgttctggaatcagtctctttggtcttgttggatccaaagcagagagtcaggataaaacggccaggggtgttctatggatacttggactcagctctcagcatcctttcctggctctctgacagtgctgtggctttgctgtgtgtccaggtcattcaggccactgtggagaagcacaaacagaagagtgagaccttcagggcctttggcggtgcctgtagccaggatgaggagcccaccctgtctccagaccagcccgtgagtcagaagggggaagtgggattcagctgttggccagggagagaggcctagggagatgattcaaacacctcaaacgaacgcacagtcccctgctggcctggtactgatctctacaggcacccgacgagcctgctgccttgcaggttagcgttcgtgtagaggaagcgttcctttagtgctgtttgtcatctctgtaccttcagcaaggcagacatgagcattgagggaccttatcttcttcagaaccggaggctcaggggctcggtgacactccccggccaccgcgccacagaggtgacatcctcaggtcatggtgcccttcttaccctccactttgaacagcaagtggatgtctttttgtggttatatttttctctccaaatgcccctgcacccctgaggagtcagctcaaagccctctgccggtagtaccaggggtagggctattttattctgcatcccttatgaagtcaccccagagctacaagaagacataactgacaggaactaggggtgcgccctacctcccagctacccactccttccaccttcactggctgctttgcttgccctcaccaggtgcatctggagggaacagctggcacaccttacctcctcagtctgtccccacctccagctggtggtcctcctgtcctcagagggtctgcttatttcttatgttttgcccccaattttctgcttcctggatgtatttttgatgaaaagttagcactctttgaaggaaggatcctgcaagctccccaaggtcaaatgacttagaggccaagggtacagagcaggcagttgttagtcagccgggcatgaggcattaggaagcctgcagactctcttcacagaccacaagggtgaatagagcatccttagggaccaccacctcatgcttccagtatgtgtgattttcagtatctggattagggtgatccaagtcagcctcacctcatgacacccaggtgtcttcagtttaggcgtggctccgggagtcccagcatttattagaccagtcgtctcatgggcactatccctcaatgcacagggtgatagctggagaaaatgtcttctacacagggtgtgccatgtgaggaggaaaccacttcacactccatctctattctcttccaggtcatgagtaccagctctgtggaacctgcaggggtagctgacagcaatgggggtactcccggggtgagtgacccacatccagggattagcaggagtgagaggtgcttggggagatgagagcaaggcaggctggagagtgaggatccaggagtcggcttgccctctcctgtgttcttggggcccaggaatgcagatgtgaggctatactgaggccaggtactggtgacttgagtaccaggggatggaggccaccagggagcctgttagtgggcattgtacaaccatgtgtatcatctgatctttgtgtgaatacttatgagctcactgtgtgtaaatttcaccttgataacatgtgcagtaaagagatgccagctctgtgtggcagcagtgtaaagacaggttcatccatcacactgagcaggttttcaggaaactggggctcccctcaccctgtgcgtgtgcatgtgcgtgtgtgtgtgtgcgtgtgtgtgtgtgtgtgtgtgtgtgtgcgtgtgcgtgcgtgcgtgtgtgtgtgtgtgtgcgtgtgtgtgtgtgcgtgtgcgtgtgtgttctcagggccaggcagctgggttcatgtgcctgtctgctagagactgatcatggcaacttgggaggatgtctttatttaaatttggggaggtctaatagtctgaggcacatacccgtgcttgctctggatcgagtacccgcaactgagctacatcatcactttggggcttgacatctacaagcacccgtggcaacagtagttgggacaactctgactcatagcttcacttatagcccagaatgacaatactgcctggcatcttgctgggtcctggatgaactaatgaattagggagagtgacaggtgccacccagggaaggtgtctctaacccatcccggacatgggctcttctccccaggtccattgacactaacctgggacacagtgctgtgttctctcctgcccacctgccccacctccagtgtgcctcatctttcctgcccctctttttctctttgtctcccatcctgtctctatgtctcttttccacactgtctctgtctcccatgacccttctctgcttctgtctctttcctctgtctctgtctttcagttgttcatgcagagcccagatctccttgcattggagacaggaaagagtgggactcagaacagctggtgactcagccctgcagctctgagaatatggctttgttagggtatgactgttggattttcgttcccataaagaggaacccagatccactgatgaggtgccttgaagcaagcgagggacaggctgtgggtggggccacctgagatagagaacagaggagggctggtgtgacattggtcccagtgcacaggcattatggggccaaggcctgttagggtggacctgaatatattgctgttccccttccttgtgaccacagcttccccaagtccctcaatagtgtgagttcaggctggccacgtgttagccaaccttgagaatgcttgtgaggcttgagggagggccaaaacatttcaggggtatgatggcaaaagaagaaggggaccctcgaagtaaaaggggactggacaagaggagacagaccctaattggaatgttgctgctgtctggcccctgcagagcagacaggcaccctaaggatgaactctgttgaaactggaaggcaggaagtctgagcgtggtgcaggcagccaagagggaaataaacatcttgccaccccagtggcttcctgcactagtctgcttgtgcctgcttcctgccacctactggcctcccctggctccaccagacctggacctctggacccactgtcagctctgcctacagaagtccaggaagtcccatggcttgacccagggtccctcagaaatacctcccaatcacacaccacataacctagtgtcaaccttctgagttgcctatgtagatgtatgcagtcggccttagccagacccaggcaatcctgattgtctctttcctgatgcatatgggttgtggctgccccacagttgagcttcccgaggaatgaatgtcacctggtcaagtcagactgaatacacattctgaaacactcccaagccagccccacatctttcagccagggagggtatccatgaccatttatttcactcataatgccttggactctgttcctgaactgtccaggccctgggatggacctatggaggcattgcttgtaaccagttgatggctagggcatccaggcccaggaaagatagttctttgttcatggaatccctgaaactgaacccacaggtcctggtgagggaagccacatgctcctggagttgcaagcagtcagggattcggggtagagatagggactgtttaaagcatcagtggtacccagaactacccccaagagcattagcgatggtgcctatgagtgagatgtctcacagctggggatgagcgtcagcaccaagattaggaggatgaaactggagggaagtggagtttgctttggattgaagccagtgatgcgtaccctagcctcactgtcgtctgggagagagatggggaagctctatggtaacctaatgcaggctgctcttgctggcttcccatctcctttgattgggaagagacagctgggagccccagagtcaaggcctccaaccacactcagggcctgccttgatcaggatatggtcactagacctgctgggtaccatggacatacttgatgcctggtcttgcccctcttcctttttcctgcatctgctccaggaagcagcctcttgaaggttgacaacattcaccccacagctgcccagtgtccagttctggtgtccctcttccttttcccttaccagaccaagctggggccagcccttcctctagcaaacagatccacaacaaccgatattccagcagagtgtggccgtgcgcttccttgttggcttttcccctgagcagagctaagccgagctaagatttcagtgacggttcagagtcatctgcagacccgcactgagcgtcatgacagggcacaccacagaggaaacctacacactgctcaaaaacaaggtttcattcttaatcagacatgtttggccttgggtgacagacttctcagcatgtctggagagggaacaaaacccttcagtgtaccgggtttgtgtcctgtgtctaggtgtcttccacccaacatcctctgtcagcccctctttcctaagagaggccaaaccacatccaaaaagttttgcaagcatccttgcagaattcaaaagcttcctcgttctgttaagagtaaaaatcaatgccaggtggtggtggcgcacgcctttaatcccagcactcaggaggcagaggcaggtgaacctctgagtttgaggctagcctggtctacagaatgagttccaggacagccagggctacacataagaaaccctgtctggaaaaaccaaaagaaaaaagtaaaaaatctagttgttcttaaccaaagttgtacacacacacacacacacacacacacacatacacacacacacacacacacacacacacacacacacatacacacacactcactcattcactcacacttaagagtctgaaattccccatccagagctccagatgtactgtgagtgacacacagacccatccaagattccatcaaagcattggccctgataacccacaagccaattgcttccctccaaccacccaccatccccccacccccctacccccatgataccggaacttccttttcttcataaggccccattctgtacctgccaaagcagagacatggaggaactcactgtgttgaccctcagtggagaacagtttccaggttgatgttagcatgctgtagatgttcatgtgtgtcctcctgcctttgctatctgatcatctgtgacctgcatatctaaccaggccttttgtgttgtggatggcatggtgggacatcaagccacatgaagggtgggctgcagtggacctcagcatcgtaggagcagtacaggactaaagctcttgtctcagcacaaaaatgggcaactctgtcctgatcaaatgaagcttactaaatgaaagtagctgcaggaatccatgacactatcttaaagatctttgcctcaggaccttccctttgtctgagccccattggtccaagggtctgagctcttggccacaccccagatcatctcagccatccctccatccccaaatgtcctgccatgatgtcctgctgacccccagaatctcctgcattctcaactaccttgcagaaataatagctggggtctctgcctgaggtccctgagagccaccacatgtcaggactatctggtggccgtttaattcttctactttgacatttagattcctcgaaagaaaaagggggcatgaacttacgaaggtgggccagagggtggaggctgaggggctgtggcagaccggaggatggtcatcttcccttctcctatcttctttcagctgtttcttttcttcttgtactaggccttcccatcctctctgtctcaatgaacacttggatccctcagcaatagaggagggtataatcagaaagtcttgtataggactgggggtccctgaggctaggtgaggggtgtgtctccatatgcaggaatactcagaacccttgaaagtgagggctttgcatgtcaggtatggaatgtctgtcctccaaccactgtacacaaagccctgacaatgggcctgaggacaaggtgcatcgcagaaggaggtcaaggccatctcccacctttgtcctcagagcaaggactcacaaactagaagaaggcagtgctgcaggagacacagcaagaggtcaaagttgaacacaacctctgatgccttggttttctcacatgccttctagggtgtttctgtaggattgcaacacgggcatgtgggtgcacatgtgtgtttatgtatgtggtatgcctgttcccaagtgtccaacacagaataggcatgtgagggggtgaaggatgacactcaggaactaggggccacgtgatcattctgggctgcattcagggacaccccagtctctggcagcggatgccatccgtgcagactcctgtccacacctctcttccctccagcttgacttcacgatgatattttctcagacacaccagataaggccacactggccaagctgtcttgccctcttgtaaccttacttcaggcgtgatgcatgatggactgggataggaagggggtgcagccgcctcttcccctctgcagcgtccactgtggctctgggcatacatggccacttgcaggatccttagcctaaccctccacacccgtggctatccatcccacagtgggctatcctgtgctcattctctgaagctgatggtggccacttacctccttatagatcgagtccagaaagtcgtcctctaaaacaagacgcgacaaagagaagcccgggtgtaagagctgtggtgagaccttcaactccatcactaagaggaggtatcgctgcaagctgtgtggagaggtgagcatggggcaggagggagggagtagatcctacgggccaggtggccactcactgtgtctttacaggtcctcataagtgggccacagggtgcagggtggaatgcacttcttgagagtactgtgcacggcttgtgggctctgtgagccacacagcagccctccctgcaaggctgcctctagatcctgtcagcattagccacttttctcattgccatgacctccatacctgacaggaatcaatttaataggagaaggctttattttcactcacagtttgagggtacaccatctactgtggcaggaaagccatggcagttcagcgctatggggtacctggtcatgatgaatctgcagtcaggaaacaggaagtggggatgggctatcaaatatcatgccttacccgagggactcacttcctctagcagtgctttctacaatcttccaagacagcaccagccagcaagtgttctcatatatgatacacttgtggggaacatttcacatttaccaaggcactgtcccctagatgcagatgccctggagcatgagactctccctctgaagtaaaagttactctctgggcagccctgatgctggcaacattccttctagctgaaaaaaaaaactgttagccctggagcctcagtgccccagcagggagtgtgtgtggtgtagtctctgtcctgtgatagagaggggacgatgtatgcttgtgtaaggggccatggaggcaggagaaggagggcttggctgtggtgggagtgcttcagtggtgcagaaggtttggtgggatcatgaaatgaggggctaccactgactggtgtctccaaagttccagtcctcctcactcagccccaaagtccttgctcctgaaaatgagcaactgagtcatggcttgacattgaactttaaagtattcttgaagaaagaactaatgctttaggtatctttagacatagatatccaagttgcatctgggggagggattgaagcaggaggagatggagataaagaagctatgtatctcacagaactactctttgttccaaggatgtaaagactgttctctgattttatattttcataaaatttcaccaggctggctggggtggggaaatggaggggtaacagaatgaatctttggtggatggacgatggtggtgatgatgatggtggtggtgatgatgatgatcatcagttagtgctcttaatccctgagccattgctgcagcccaatgtgcattttcttgatggcggtgtcgtgggtcttcttatgtaagtgggctatgctcttttcttcttacgcatagggcttttgaactctgggtggtctaggtaaggcaagcagaccatgggcactcaaggagactaaagtcactctctgccctcagatggggcctccagcatcccaggacaaggatttttttcccctctctgcacaggtctttcctcctcatctgctcaggatgcatggtcaaaggtaccctcttgtctcgcaggtcatctgtaggaagtgctcagagttcaaggcagagaacagtaagcagagccgcgtctgccgagagtgtttcctggaagagcccctggtccctccaagccccagctctgagactcccactgagctcaaacagaatgcagaggtgggtgttcctggttcctgggaccaggatggacacagaggacgtctcagtgtggtccacaggcctagaatcagggcaagatgcttggagcatgtgcatgtgtaagacatctcagagattagtaagtgcctgggaaccacttatacctaggagtcagctggaaacttgtgttggtccattctgggtctgactggaggtgaaactaccccaggtctaggcactaagatccatggaggaccttcttcaccttagggcagacagctgtgtgtgtgtgtgcgtgcgtgcgcgtgtgtgtctgagcatgtatatatatgtgtgtgtgtttgtctgtgtgtgtgtctgtctgtatgtgtatctgtgtatgtatgtgtgtctgtatgtctgtctgtcttgtatgtgtgtatgtacatatgtgtgtgtgtgtgtatctgtctgtgtttgtctgtgtgctgtgttaaaactgcagggtcagctccccctccaccactactgcttctccagccttccttcttaaaggaaacagtcccttttatagaatagtgggacatttaagaacaggaagcctccattttgcagggaaactacattctcctttatctccactgcatgcatgtagtttggttttttgtttatttgtttgtttctttttggttttttgagacagggtttctctgtgtagctctggctgtcctggaactcactttgtagaccaggctggcttcgaactcagaaatctgcctacctctgcctcccaagtgctgggattaaaggcgtgtgccaccacgcccagcttgcattcatgtagttgttgtctcctgggagtctaatgtcagtctccctcccaaaagtgctgggggatggtccaagaaggctaggggtcagcaactgccaaagcttctgccaccctggctgctaggtatgcttgggacatcaacgacctaaggctgtgaaggactgaggctacagtagcctcgatggtgaggccctgctggccctacctgctgaccccaccctctctgctctgcactctcaatctccaggtgtattcaggggatcccaggggtgtggcaaaaggccttggagggtcactggatcttgggggaaccacctccaacaggatgtgtcagaaccatgttcttgtggctcagggaatcctgtttccattgatagcgctaagccacataagactagagaagcagggtctataggatgtgcatttgaggtgtggatgtgctcatgtgtgtgatgtggaaagtgtgtgtatgtacatgtgtatgtggtgagtggggtagtgtggcgaagactgtaatgctcttggtcccttcaccctttgacacacatttctgtaattgctattgaatttcatctatttatctatctatctatctatctatctatctatctatctatccatccatccacacacacatatacatatatatattcttgctatgtagcctgagacttgcaaacctcctgcctcagcttcctaaaagctgagattataaacacatatcatcatgcctagcttccccttgctacttttacattgtcctagcctgggatggtctcactctcctaagagggaacagatccaagccctacttgagaccacatgcactgttctattggcctccagtaacccttagaaccctaaaaatctggccctagcctgtatgcaggcctcaactatgtctctgtggtagtcacctccttccaagcatggtccatgatccagccccagcctctgcagaggacaaagacatcactacaggtgaggctacccctgacctatttttttctgtctccagaagcctccctctgtagatcctcggcccagcctgctctgcggtaccctgaatctgtcagacgatggtacgacctggaatgaagtgtgggcagccatccctgaatcagatcctcaggtgctagacctgctggcaggcagccaggtaagtgtcactgtccttgttcacgcccagggctgtgagaggggctctgctaccacagtgcagagcctcaagcttgaagcgcccatagtaggtcaggaccatttccttgatcccctctagccatgtggcctggccttcaacttcttccaatgtccagagcaaccctggaccccattcatggaagacaggttcctgtaatgtgtgtaagacagccagagtgagaccaggcacaggctggggcacaaggttgggccctcctccccacacatagtcatccattcacatcttccttcatccctacatcttaggcagatagatgcatttgggcccttatgagccttgcttttcctctctcaactcccgttgctgagtcactgggttatcttgcctcacctaccctggctcagggcttctgagggaagccatagttcagagggaagacacctggtgaggcttgttgaaatgaagggagcctcctcccagcacctacctgagaaagcctgttgggcagctcgttctagtggcaggctgcactgtgtaaggcatgttgggtggccactggcatgagctggaggcacaactgaccctctctgtttcctgcaggctggcagactgctgtatagcatcccactctctggctgtaatataacgatgcctgaccctgaggaggggctggaggcaggatgtgcctggaagctacatcagggctcacagacctggtggctgagcgccccctccacaaagctgcagcaatgctggctgaaagccctgggcactgccgtacatggggacacagccggggacagaccaggggcctcccagccccaggccccagcaggcacggacactccatgagcagagcctcctactgtctttcccactgctatatttggcctgtgttcttttctgggtgaccttagaagtcaagagaagggatgaaggactcctgtgaccactgaggatggaccacgtggcccagagaagagtagctctgggtccaagatcactcagcaagccttagacaagagttgggcttctggcttctggctccagtgccagcgttgtggtgagagcatggagaatggccactacgaagcaaatgtcacccgagcagactgagtgatgacatcagccctcaaaggcacaagggcactgtccaggggtgatcatgcccaacctggtgtgctgtcactctgggaaaggcagagctgtctgtggcctgaccggccattgtccatctatccactgtgtgacctgggccatgacctgctcctctgggcttcccttttatactgctctctcctgaagcattccttgtctgctattcctgctgagcccatgtagggcagggagcaagggccttcttactccaccattcccaaacaaggacactcagaggttgcggggaggctgaccctcacccctgtgtggcaggtttgtgaggtttcagacgagttcctctgtgggcaggtgccatgcttatctgcataaataaatgctggctgcctgcaagtgaatgcagcctgggcacctccaaccccatctttacagggctcccctcaaggcaggtggcttgtagaggaacgtagacgaaggtggcaagatggcacagaccacacacttgtcttacagagcagttctgcatccctgatgctgtaggtagtggatgagcagctaagctggacagcagggtgggagtgctgtcactcaagatgtggggatgtgacaaaggtcatggggctcgggaggctgttcgcctcgcagggagtaggaaatttagagaccagtgatggagttctgatccttgctctctagcatcagcacagctctgttatggggacaactgggcagatataaggggcaattacatggtggggtgaggaggtatagagccagaaatgggtgctagttataggtgacattgggacacacagatgaggtggggcctcaagtgaaatgggggcctgggttgggagtcttggtgaggaaggatgatggggtagaattaaaatggtttggagcagaggcgaggtggatggggtaggggtgagatgaatgtggcaggggcttggtgaatggggcaggcatgaggtggatggggcaggggagaggtggacggggaaggggtgaagtggatggatcaggggtgaggtggcaggggaaggggtgaggtggatggggcaggggtgaggtggaaggggcaggggtgaggtccaaggggcagggatgaggtggataagatacaagtaaggtgaaataaggtggatggggtgcaggtgaggtgtcagaacacagctgattctatgcaagagccccctggattaggtgtggtccgcctcaggaccatctgagctgagtggtccttctttgccctgaagaaactgagcaaaacaagcggaatgactccacagtgggaggaatgagttgggggccttctaactcctactaagtgaagccctcacccagttctgaatgggacagtgttgagggtggcccaggtgacacaaggaacaaaggaggggcttttcttggctaggtgcactatgtggtagacacactggacaggacaaaccttcagcctcttgccacctttgcttcttcctcctgctcatagcggttctggcccttgcatttcaaggatcccaagtgctcgtcctctgaagagtcagagcctgaggaggtgcttctgtgtgtccttccccctggggagtgcctctgcccattctgtcccaggattcggactagtcagtttgcagcttggaggctcctgatgctacctgaacagaaaggtgcataagtgactcttcttgttgctgtgacaaagtcttagacaaaatcaccttatggaagaacgagtttatttggctcacaacttgagggtatgatccatcatggtgaggaaaaccatggatgcaggagagctggctggattctgtccatggtcaggaagcaggagcactggatgctggctctccacccactttctccgttttattcattccaggaccctaagccttgggctgctgctattcacattcagggtgggttttctcttctcaattaaacttttctggaaacaccctaatgacatggccagaactttgtcttcttgtgattgtgaatcctaccaggttgacaataccaaccacctcagcccaccccttgttaacttgacactcaagcatgtcacttttaaatggtaacattctgaccttagaaagtctcatgctcattttatgcagcaatatgcatttagtccatctctaaaaatctgcaaacccttcacagatccaattctccccctaccccccaagacataagtacaagactctctgctgagtctcaggcaatcttttaactgtaagcccctgtgaaataaaggaaaaacaaaacaaaacaagttacatacttctaatatccaatggtacagaataagtgatcccatttcaaaggtgaggatttggacatgagacagagactcagcagactcaacagttactgctcttacaaaggaccacagttcagtttccagcacccatgacacggagctcacagttgcctgtagtttcaactccagagatctgacgccctcttttggcctcttctaggtacctacatgcatctgaacacacatatgcatgcacatgcacacgcacatacacaaataaaacgaggattagaggcacaacacagtgagattgaaccaaagcaaaagtgtgtcccagccagataaacaccaagtcttgatgcagcacctgggcttcgggggcatcatctgggctccagagccttgggcaggccctctcctgcacttctgcttcttgcagcatatagcctgtcttcattcaggtccactccatacctgcagatttcccaaagacacctcttaccgttctggcatctccaatatcctgggggtgcaatactaggctctaagctcacagctccacacaatggacttttcaaatccaaccataacacacggtgtctggcctccgctgctttctaggattatagtacaagccacacaagttgtgatactcttgcatctcgcatgcctataaaaccggcactacgttctgcttccggatccagatgtagtctggcttcctcctcctgtcaccgctgaagtgtgccaggctgaggaaacgctgctctagatggttgttttctagcaggaaagctcagaagtgtttacaactcagtggtacttaccacccaggctccctcctttcgaatggatctgcagtctacaagtgagagcctttcataggtggaatcttgagttgccgggtaccttgcctgttgtcctggtggtgaactgatgtttccctttaagggtgttaagtctttaacaacaacagctgctttcccagcaaggcctcgtgggactttacacacccttactcgctgagctgcactcttcatagcttgctgctcccgtttctgagaagagccaacagtggccgagccacgggctgcctgctattctgtcttgaagtatcctccaccaaaccagttagcctattacctttgagttcagcctcactcaggcttttgggacatggacaaagcatggttgaagatgagattctttgccagaatgtcacacacataggctggttgcccataaagaaagtccttaactctctggagacctcatgagccaggccctcctcggtttctctcatggcccattagtctctattttcaccgagaactctagggctttcctcttgcccaccccattccaaaggtctaagaacagcctggtcaggtttactccagccctactcccaggtaccaattttctgtattggttacttttttctttgttctgacaaaaagaaaaacatggatggaagggattttacaggtgtgaggttatggtccttcacaggacttggggggagaaggcacgagcttgaggcagctggtcactttgtatccagtcaggcagcagggggtgagaaatgctgctgctagctcagctccattttccctttttattcagtccaggaccccaagccctgagatggtgccctctctgctaattaaccctctctggaaatactctcataggtgtgagcacgtttgtcttggtgactgcaaatcctgtcaagacgacagtaaaggacaacatcacaaaagacttttatatccaagtgcatgggaaatggtgtaaaaccaggagaggagggtcccacacagggaaaaacccagctgctatgttagcactcagcccacggaccgcctcacctggcacaccatccccactgtgccccagcactggcttcatcccccacagtcccagggaagagagatcagcttcagagacagctggccaccaaccctctctgccacctgtataatctttggggtttggcattaagcaccaattactccaagacctctcttgatgccttttagcaacttgtacatgtattgggtgcccaggaaacagaggtgctcacctttgtattaggtagatctcaggggtacggcaaggaaaagtctgtgcccaaccaggagtcatagaggctgctgcctgcgcagtgatcccatgactagatcgttcagtggctacctggaactgccttccttgcagagttctgcacaggcatgggtgaggccagctgtccatgggtggggtctaagcctgtccacccttttcagtatttccagacagtcctccaacagtggatagctgccagcccacaactcttctcccatggtcatccatcattataggtagaacattcctggtgaggagagagagagagagagagagagagagagagagagagagagagagagagagagaacccacccagaccacaggttccctctcccagaccggagctccacctctggttgctgggtgtcagaattccagagctacaggtctgggtgagacaggtgggatgcagccagatcagggcagacagactttgagaaagcagcagcctccaccaacattctacacattccagaccactaacgccaagcttctttagcctgcccagcccatgaatgtctgagttgggtgcctgctctcaggtaggagctctggcaccctcctgcaatccccaggaaaactacctcttagccaccaatggtatggtcccacagcaacactgggtcacctcccaacctaccagtttgcttttggagctgaaggacctaaacacttctccctgctgggccataggaagcacatacccagatgttgccttcggtaggagcatccccagatgtctcaggatggtacccaccttgtctgccatctttgttctctctgtgctttatttccctgcttgccaagccaagatatgctggctagggattggactctgccatctttgaccagctggggcaagatgcaggacaacaagagactgtgccaccaggtgatgtgggacaacaggagactgtccgaacaggtctcaggaacatggatcatctcagagaagaaatgggggctgcacccctgagttctgggaaagtgaaagtgaaaggtatgctaagaagtaggtgctctgctcttcatccattacatgggtaggagtagcaagaacccagttccttcaatcccagggattggctcagagtggccatgtgactcaagatggagggtcctatgaccatgagaggagcaagctacccaaaagtttagacctttttggaaccagaaggaagatgttctcatggaggctgatttctgatttcgcctcaggaagagacatcagaacattgatttcctattagatcagaccttctacaaagaactgacctgtcccacacagcagctgccgacagggaccagcaatgtctgttagaatctcttgtcttgctcacatttcctgcattcacaaaccaggctcacagcactccggtgaaatatgagaccctttctatcctgccagagccatacctgccctacaggaagctcagttttcagggccctgacaacccatacaaatacaacaccccctttcttcaagagtctccaatccaaaagggagcctggctttccctttctttatcaaaactcaaagatgtaaatcattgccccttttgaagaaaagcaagtcctatctccaaaggacaataggaaaactactaacagcagcaaagcccatccatttctaggggagacagcttttcatctcaaagcagcccacctcttagggagcaagatgacgtgtgacactgagtcctctgtcttcgcagagtctcactggacgcagcgtctgtcttttccctctcacagaggatgaccctgctgctctctggaacagactctgcaacacaggttcaggctcaaggaatttatttggactgcagtcaagggaggtgacaagcaagacaatgaggacaaatgctgatacagggtgtattgtgtaaagtattgatggtgcccctgatccctgtcatcccagaacctcagatgaggtcattgctgtgatttgtgaggggcttcagcgagatccaggacacgtggggatactttgaccaaagtggcaaaaagacgaagtttattacagagcccaaatcctagcatatctcatgggaccagcaggaaaaagagcatttgggacctgtatctttgctggggcccacagtgctgctgaggtgagtctcctgaaacactagctgggctcacctgaagatgacatagggctgagggccaggggcttgagttccatttgtgtcttctttcacttttgagacaaaggaatgactaaggcaacttaaaaagaggaagggtttgctttgacacaggatctgagggtatggcctgtcagagcagggaagtcatggcagcagtgatgaatgttggtgctcaggccacattcttcttttcattgagttcagcatcccaggccttgggctggtgtttttctcacttggggtgggtctttcctgttctgaaaactcctgcacagacacattcagaggggtctcaatggtgactctttatctagtcaataatagggacaatggaccatcatagctgtcagggcctcagggtcagaggcaaaaggctgaaggtctaaaggaggaactgaggaaggatacctcgagagatgcaggtcccactgtatgagcctgagacaggcatgcatgaacggctgggctgtatcacagtgagggttttcaggatcaacagaaactggggagacccaggtagaaccattccccaaagtcttcagagtgtgaccaagcagaaacctctgttttagactggtagctctaagttggcagttgtcaatctatcggtcacgacgcctttgcaagtcaaacgactcgatcggaggggtcacctaagaccatcataaagcacagatgtttacattatgatttccacctatgaggtagcagcaacataacgttgtgattggggtaacgacagcgtgaggcactgcatgagggtcacagagttaggaaggttaagaaccactgttctgagtgcagagagtaagcacctgtgagcctaggcttgtcaagtttggtaccctgcacagaagggttacaaaaggctgctgctgattgtgtgataggtacacatgtaggggtggggaaggaagggggggtttgtgggggggagggttgctgtcacaggtgctggagagtgtgtaggtagcttgggagttggatatcgttggaggctaggagagttttgagggatgctataatgtggaaatcgttaactgccccaaaagttcacttattgaaggtccagtccttagtatgatgatagaggtgagacctttaagaggtagatcatagcaggaggtcctgggtgtctcggaggtccttggaaaaaagtgtgagatcctagtcagacgtgacctcctcccatgaacacacttactgtcagtctctctcagagctgagctgatgctgatgtcacatccttgaacctccagaatagagagtggagtgaacctcccttctttgtgaaattcacctgctttgtgtgcttctttttttgtttgtttgtttgtttgtttgttttttcaagacagggtttttctgtatagccctggctgtcctgcaactcactctgtagaccaggctggcctcgaactcagaaatttacctgcctctgcctcccaagtgctgggattaaaggcgtgccccaccactgcctggcgatttgtgtgcttctttagagcaaagcaaaatgcactaatacaagcgctttagagaatcctagagctacgcacggctttaatgtggcttgaactagaggttctgcataagtctctggtatgtgaatatttagtccccagttggtggctgcttgtggaggattaagaagtgccttagttagggtttccattgctgtgaagagacacagaaaccaaagcaattgttacaaaggacaacatttaactggggctggcttataggttcagaggttcagtccattatcaccgtgtggggagcatggcagcatccaggtagatgtggccctggagaaggagctgagagttccacttattgttccaaaagcaaacaggagaatactgacatcctgaggcagctagaaggaagctctctcaaagtccagccccacaatgacacacttcttccaacaaggcaacacctcctaacagtgcatctcctcaggccaagaggtggtgtggatgtagccttgctgctggaagtatggcacttggagatttctaaagacattcctattcccattgtccctctcctgctcgtggatcaagatgtgagctctcagttgctgctgccacttctgcctttgcaccaccatcatggactcaactacaagcccaaggagacgcttccttttgtaagttgccctggtcagggtgttttgtcaccatgacagaacaacatgttagagacttaatgacagtgttaacagtgccgaggtgataccttaaattctactattcaggaggcagagttgaaataagcccctccctttctgctgtgtgatttcttaactacttttcaaagcaagcagaaggttcctgtcagacccaagcatctgagtatgttctagctccagaaccatgaaaatgtcatcactgtttataaattacctggcttgtgttattctgttatagtaacactaaatggattaagacaaatacaaattgccaaaattacttttgaaagtgttcaatatctctaagccatcaggaaaattaactactccgagatacctcctcacactaattagaatggtcatcatcaataaatctgacacaaattttggagaggatttggagagaaattaatttttattcactgctggtaaggtgctaattagtacatctatggtgttaatcagtttggagatttctcaaaacattaaaaagtgaactagcataaaacccagctattctactcctgagcatatacccaggaaactccataccttatcataggaatatttgcacctcgtgtgtattgcaaacagttggaatcaacctgactgtccatcaaaagattaacatataatgataatctgttaatgaatgaaaagaagaaataaaaaggatagcaaggacatgactgctcctaggtatggtggaggggaaaggttattgtagctatatgggagagcacagccagaggcaggcacatctgggggagtccagagcggtcatgaccagactgagcaaggccatatgtggaggagggaaggggaagggagaggggaaccagcagcccggtgttccaaaggtatcaaaagaatagagggaaaggaccaagtaaccaaaacggttgattatatagggaagagaagctagggggggaagcggcccagaccctaggctagagagtgtagggtgagaggcatggtatgccagccagaagggtccaggaacaaggactgagggatgtaggagaaccaggcagcagggttcactttgagatgttaaatagggacctcagccatttaccctgggtttgaaagtagttaaggtactacttataaaacggtggaatcctattcagctgtaataaaaacgaaatcacaattttttttcaggaaaaggggctgatgtattaagcatggttacacaatttcagaaagaaaaacgtgtgttctccttcatacgcagaacctagccaatatgagtgtatgtaaacaaatgtacatgtaggtccagtacaacatgaagaaaagagaacaagaaaggctaggcattagaggtgaggagggactactgtggataagagaaacgacatttgctttgatggaaggtgggtatataaaataatattcaatactgaaagtctaaaatccagtgcaatgctacagagcttcagaattggctggtctaac

SEQ ID NO: 1641 - DNA, 2952 bp, Mus musculus
tgggttttgttcttgcatgagttcagccctgggggagatgcagactggtcttggaagaaggcaccttctaaacaacttcacttccaatggtctgggcaagacattttaatagattgttctagactctgttgggcaattccaaagccccggccggaggaagcaggtgcctgttcatcaatccctgacagcctcattgggcaacagtgttaggcaacaggaattccttgggcagcctcctagcagagccccgggagtttggctgtgaagatggaattgggtaggagcccctcgacaccccaagaagaagccatttcccctcttggagtacttggcactgggcccagcagctccccactagggaagcttcaagcccttcccatcggtccaggtgcccaccgaggggctcatagcagctcagccccagcaggggacagctccacgcgggagccaagtggtgccatgaagatccccaacagagacagtggaattgacagcccatcctccagtgtggccagtgagaacttcccctgtgaggagagcagtgagggctctccaagccctgccatcctggggctaccctctgagacggcttcggacagccgggtcccacaggacaacccccaggaggaagaagatagtggcatgggtgaggagcctgaccccaaggtcaccctgtttaggcctcaggaggatgtcagcttgactcagtgctctgacccacagaagctgcttcatattgcccaggagctcctgcacacggaggaagcctacgtgaagcggctgcacctgctggaccaggttttctgtactaagctgacagaagcagggatccctctggaagtcaccaccggcatcttctcgaacatctcttccatctaccgtttccatgggcagttcctcctgcccgagctgcagaagaggatcacagaggagtgggatacaaaccctcgcctcggagacatcctgcagaaactggctccattcctgaagatgtatggcgagtacgtcaagaactttgacagagcgatggggctggtgagcacttggacccagcgttctccgcagtttaaggatgtcatccacaccatccagaagcaggaggtgtgtgggaacttgacactgcagcatcacatgctggagcctgtgcagagggtcccccgctatgagctgctgctcaaggactacctaaagaggctccccagggatgccccagaccggaaggatgcagagaggtccctggagctcatctccacagctgctgaccactccaatgctgccattaggaagatggagaaaatgcacaagctcttagaggtgtatgagcagctgggtggggaagaggacatcgttaacccagccaatgagctgatcaaggagggcagcatccagaagttatcagccaagaatggcaccactcaggaccgacacctcttcctgttcaacaatgtgatgctctactgtgtacccaaactgaggctcatgggccagaagctaagtgtacgggaaaaaatggacatctctgatctccaggtacaagatattgtgaaaccaaacgcagcctgcacgttcatcataacaggaagaaaaaggtccctggagcttcagactcggacagaagaagagaagaaagaatggattcaggtcattcaggccactgtggagaagcacaaacagaagagtgagaccttcagggcctttggcggtgcctgtagccaggatgaggagcccaccctgtctccagaccagcccgtcatgagtaccagctctgtggaacctgcaggggtagctgacagcaatgggggtactcccgggatcgagtccagaaagtcgtcctctaaaacaagacgcgacaaagagaagcccgggtgtaagagctgtggtgagaccttcaactccatcactaagaggaggtatcgctgcaagctgtgtggagaggtcatctgtaggaagtgctcagagttcaaggcagagaacagtaagcagagccgcgtctgccgagagtgtttcctggaagagcccctggtccctccaagccccagctctgagactcccactgagctcaaacagaatgcagagaagcctccctctgtagatcctcggcccagcctgctctgcggtaccctgaatctgtcagacgatggtacgacctggaatgaagtgtgggcagccatccctgaatcagatcctcaggtgctagacctgctggcaggcagccaggctggcagactgctgtatagcatcccactctctggctgtaatataacgatgcctgaccctgaggaggggctggaggcaggatgtgcctggaagctacatcagggctcacagacctggtggctgagcgccccctccacaaagctgcagcaatgctggctgaaagccctgggcactgccgtacatggggacacagccggggacagaccaggggcctcccagccccaggccccagcaggcacggacactccatgagcagagcctcctactgtctttcccactgctatatttggcctgtgttcttttctgggtgaccttagaagtcaagagaagggatgaaggactcctgtgaccactgaggatggaccacgtggcccagagaagagtagctctgggtccaagatcactcagcaagccttagacaagagttgggcttctggcttctggctccagtgccagcgttgtggtgagagcatggagaatggccactacgaagcaaatgtcacccgagcagactgagtgatgacatcagccctcaaaggcacaagggcactgtccaggggtgatcatgcccaacctggtgtgctgtcactctgggaaaggcagagctgtctgtggcctgaccggccattgtccatctatccactgtgtgacctgggccatgacctgctcctctgggcttcccttttatactgctctctcctgaagcattccttgtctgctattcctgctgagccc

SEQ ID NO: 1642 - protein, 740 aa, Mus musculus
QSPGSLAVKMELGRSPSTPQEEAISPLGVLGTGPSSSPLGKLQALPIGPGAHRGAHSSSAPAGDSSTREPSGAMKIPNRDSGIDSPSSSVASENFPCEESSEGSPSPAILGLPSETASDSRVPQDNPQEEEDSGMGEEPDPKVTLFRPQEDVSLTQCSDPQKLLHIAQELLHTEEAYVKRLHLLDQVFCTKLTEAGIPLEVTTGIFSNISSIYRFHGQFLLPELQKRITEEWDTNPRLGDILQKLAPFLKMYGEYVKNFDRAMGLVSTWTQRSPQFKDVIHTIQKQEVCGNLTLQHHMLEPVQRVPRYELLLKDYLKRLPRDAPDRKDAERSLELISTAADHSNAAIRKMEKMHKLLEVYEQLGGEEDIVNPANELIKEGSIQKLSAKNGTTQDRHLFLFNNVMLYCVPKLRLMGQKLSVREKMDISDLQVQDIVKPNAACTFIITGRKRSLELQTRTEEEKKEWIQVIQATVEKHKQKSETFRAFGGACSQDEEPTLSPDQPVMSTSSVEPAGVADSNGGTPGIESRKSSSKTRRDKEKPGCKSCGETFNSITKRRYRCKLCGEVICRKCSEFKAENSKQSRVCRECFLEEPLVPPSPSSETPTELKQNAEKPPSVDPRPSLLCGTLNLSDDGTTWNEVWAAIPESDPQVLDLLAGSQAGRLKIPLSGCNITMPDPEEGLEAGCAWKLHQGSQTWWLSAPSTKLQQCWLKALGTAVHGDTAGDRPGASQPQAPAGTDTP

SEQ ID NO: 1643 - DNA, 2685 bp, Mus musculus
atggaattgggtaggagcccctcgacaccccaagaagaagccatttcccctcttggagtacttggcactgggcccagcagctccccactagggaagcttcaagcccttcccatcggtccaggtgcccaccgaggggctcatagcagctcagccccagcaggggacagctccacgcgggagccaagtggtgccatgaagatccccaacagagacagtggaattgacagcccatcctccagtgtggccagtgagaacttcccctgtgaggagagcagtgagggctctccaagccctgccatcctggggctaccctctgagacggcttcggacagccgggtcccacaggacaacccccaggaggaagaagatagtggcatgggtgaggagcctgaccccaaggtcaccctgtttaggcctcaggaggatgtcagcttgactcagtgctctgacccacagaagctgcttcatattgcccaggagctcctgcacacggaggaagcctacgtgaagcggctgcacctgctggaccaggttttctgtactaagctgacagaagcagggatccctctggaagtcaccaccggcatcttctcgaacatctcttccatctaccgtttccatgggcagttcctcctgcccgagctgcagaagaggatcacagaggagtgggatacaaaccctcgcctcggagacatcctgcagaaactggctccattcctgaagatgtatggcgagtacgtcaagaactttgacagagcgatggggctggtgagcacttggacccagcgttctccgcagtttaaggatgtcatccacaccatccagaagcaggaggtgtgtgggaacttgacactgcagcatcacatgctggagcctgtgcagagggtcccccgctatgagctgctgctcaaggactacctaaagaggctccccagggatgccccagaccggaaggatgcagagaggtccctggagctcatctccacagctgctgaccactccaatgctgccattaggaagatggagaaaatgcacaagctcttagaggtgtatgagcagctgggtggggaagaggacatcgttaacccagccaatgagctgatcaaggagggcagcatccagaagttatcagccaagaatggcaccactcaggaccgacacctcttcctgttcaacaatgtgatgctctactgtgtacccaaactgaggctcatgggccagaagctaagtgtacgggaaaaaatggacatctctgatctccaggtacaagatattgtgaaaccaaacgcagcctgcacgttcatcataacaggaagaaaaaggtccctggagcttcagactcggacagaagaagagaagaaagaatggattcaggtcattcaggccactgtggagaagcacaaacagaagagtgagaccttcagggcctttggcggtgcctgtagccaggatgaggagcccaccctgtctccagaccagcccgtcatgagtaccagctctgtggaacctgcaggggtagctgacagcaatgggggtactcccgggatcgagtccagaaagtcgtcctctaaaacaagacgcgacaaagagaagcccgggtgtaagagctgtggtgagaccttcaactccatcactaagaggaggtatcgctgcaagctgtgtggagaggtcatctgtaggaagtgctcagagttcaaggcagagaacagtaagcagagccgcgtctgccgagagtgtttcctggaagagcccctggtccctccaagccccagctctgagactcccactgagctcaaacagaatgcagagaagcctccctctgtagatcctcggcccagcctgctctgcggtaccctgaatctgtcagacgatggtacgacctggaatgaagtgtgggcagccatccctgaatcagatcctcaggtgctagacctgctggcaggcagccaggctggcagactgctgtatagcatcccactctctggctgtaatataacgatgcctgaccctgaggaggggctggaggcaggatgtgcctggaagctacatcagggctcacagacctggtggctgagcgccccctccacaaagctgcagcaatgctggctgaaagccctgggcactgccgtacatggggacacagccggggacagaccaggggcctcccagccccaggccccagcaggcacggacactccatgagcagagcctcctactgtctttcccactgctatatttggcctgtgttcttttctgggtgaccttagaagtcaagagaagggatgaaggactcctgtgaccactgaggatggaccacgtggcccagagaagagtagctctgggtccaagatcactcagcaagccttagacaagagttgggcttctggcttctggctccagtgccagcgttgtggtgagagcatggagaatggccactacgaagcaaatgtcacccgagcagactgagtgatgacatcagccctcaaaggcacaagggcactgtccaggggtgatcatgcccaacctggtgtgctgtcactctgggaaaggcagagctgtctgtggcctgaccggccattgtccatctatccactgtgtgacctgggccatgacctgctcctctgggcttcccttttatactgctctctcctgaagcattccttgtctgctattcctgctgagccc

SEQ ID NO: 1644 - protein, 731 aa, Mus musculus
MELGRSPSTPQEEAISPLGVLGTGPSSSPLGKLQALPIGPGAHRGAHSSSAPAGDSSTREPSGAMKIPNRDSGIDSPSSSVASENFPCEESSEGSPSPAILGLPSETASDSRVPQDNPQEEEDSGMGEEPDPKVTLFRPQEDVSLTQCSDPQKLLHIAQELLHTEEAYVKRLHLLDQVFCTKLTEAGIPLEVTTGIFSNISSIYRFHGQFLLPELQKRITEEWDTNPRLGDILQKLAPFLKMYGEYVKNFDRAMGLVSTWTQRSPQFKDVIHTIQKQEVCGNLTLQHHMLEPVQRVPRYELLLKDYLKRLPRDAPDRKDAERSLELISTAADHSNAAIRKMEKMHKLLEVYEQLGGEEDIVNPANELIKEGSIQKLSAKNGTTQDRHLFLFNNVMLYCVPKLRLMGQKLSVREKMDISDLQVQDIVKPNAACTFIITGRKRSLELQTRTEEEKKEWIQVIQATVEKHKQKSETFRAFGGACSQDEEPTLSPDQPVMSTSSVEPAGVADSNGGTPGIESRKSSSKTRRDKEKPGCKSCGETFNSITKRRYRCKLCGEVICRKCSEFKAENSKQSRVCRECFLEEPLVPPSPSSETPTELKQNAEKPPSVDPRPSLLCGTLNLSDDGTTWNEVWAAIPESDPQVLDLLAGSQAGRLKIPLSGCNITMPDPEEGLEAGCAWKLHQGSQTWWLSAPSTKLQQCWLKALGTAVHGDTAGDRPGASQPQAPAGTDTP

SEQ ID NO: 1645 - DNA, 2319 bp, Mus musculus
ccaagtggtgccatgaagatccccaacagagacagtggaattgacagcccatcctccagtgtggccagtgagaacttcccctgtgaggagagcagtgagggctctccaagccctgccatcctggggctaccctctgagacggcttcggacagccgggtcccacaggacaacccccaggaggaagaagatagtggcatgggtgaggagcctgaccccaaggtcaccctgtttaggcctcaggaggatgtcagcttgactcagaagctgcttcatattgcccaggagctcctgcacacggaggaagcctacgtgaagcggctgcacctgctggaccaggttttctgtactaagctgacagaagcagggatccctctggaagtcaccaccggcatcttctcgaacatctcttccatctaccgtttccatgggcagttcctcctgcccgagctgcagaagaggatcacagaggagtgggatacaaaccctcgcctcggagacatcctgcagaaactggctccattcctgaagatgtatggcgagtacgtcaagaactttgacagagcgatggggctggtgagcacttggacccagcgttctccgcagtttaaggatgtcatccacaccatccagaagcaggaggtgtgtgggaacttgacactgcagcatcacatgctggagcctgtgcagagggtcccccgctatgagctgctgctcaaggactacctaaagaggctccccagggatgccccagaccggaaggatgcagagaggtccctggagctcatctccacagctgctgaccactccaatgctgccattaggaagatggagaaaatgcacaagctcttagaggtgtatgagcagctgggtggggaagaggacatcgttaacccagccaatgagctgatcaaggagggcagcatccagaagttatcagccaagaatggcaccactcaggaccgacacctcttcctgttcaacaatgtgatgctctactgtgtacccaaactgaggctcatgggccagaagctaagtgtacgggaaaaaatggacatctctgatctccaggtacaagatattgtgaaaccaaacgcagcctgcacgttcatcataacaggaagaaaaaggtccctggagcttcagactcggacagaagaagagaagaaagaatggattcagatcgagtccagaaagtcgtcctctaaaacaagacgcgacaaagagaagcccgggtgtaagagctgtggtgagaccttcaactccatcactaagaggaggtatcgctgcaagctgtgtggagaggtcatctgtaggaagtgctcagagttcaaggcagagaacagtaagcagagccgcgtctgccgagagtgtttcctggaagagcccctggtccctccaagccccagctctgagactcccactgagctcaaacagaatgcagagaagcctccctctgtagatcctcggcccagcctgctctgcggtaccctgaatctgtcagacgatggtacgacctggaatgaagtgtgggcagccatccctgaatcagatcctcaggtgctagacctgctggcaggcagccaggctggcagactgctgtatagcatcccactctctggctgtaatataacgatgcctgaccctgaggaggggctggaggcaggatgtgcctggaagctacatcagggctcacagacctggtggctgagcgccccctccacaaagctgcagcaatgctggctgaaagccctgggcactgccgtacatggggacacagccggggacagaccaggggcctcccagccccaggccccagcaggcacggacactccatgagcagagcctcctactgtctttcccactgctatatttggcctgtgttcttttctgggtgaccttagaagtcaagagaagggatgaaggactcctgtgaccactgaggatggaccacgtggcccagagaagagtagctctgggtccaagatcactcagcaagccttagacaagagttgggcttctggcttctggctccagtgccagcgttgtggtgagagcatggagaatggccactacgaagcaaatgtcacccgagcagactgagtgatgacatcagccctcaaaggcacaagggcactgtccaggggtgatcatgcccaacctggtgtgctgtcactctgggaaaggcagagctgtctgtggcctgaccggccattgtccatctatccactgtgtgacctgggccatgacctgctcctctgggcttcccttttatactgctctctcctgaagcattccttgtctgctattcctgctgagccc

SEQ ID NO: 1646 - protein, 609 aa, Mus musculus
PSGAMKIPNRDSGIDSPSSSVASENFPCEESSEGSPSPAILGLPSETASDSRVPQDNPQEEEDSGMGEEPDPKVTLFRPQEDVSLTQKLLHIAQELLHTEEAYVKRLHLLDQVFCTKLTEAGIPLEVTTGIFSNISSIYRFHGQFLLPELQKRITEEWDTNPRLGDILQKLAPFLKMYGEYVKNFDRAMGLVSTWTQRSPQFKDVIHTIQKQEVCGNLTLQHHMLEPVQRVPRYELLLKDYLKRLPRDAPDRKDAERSLELISTAADHSNAAIRKMEKMHKLLEVYEQLGGEEDIVNPANELIKEGSIQKLSAKNGTTQDRHLFLFNNVMLYCVPKLRLMGQKLSVREKMDISDLQVQDIVKPNAACTFIITGRKRSLELQTRTEEEKKEWIQIESRKSSSKTRRDKEKPGCKSCGETFNSITKRRYRCKLCGEVICRKCSEFKAENSKQSRVCRECFLEEPLVPPSPSSETPTELKQNAEKPPSVDPRPSLLCGTLNLSDDGTTWNEVWAAIPESDPQVLDLLAGSQAGRLKIPLSGCNITMPDPEEGLEAGCAWKLHQGSQTWWLSAPSTKLQQCWLKALGTAVHGDTAGDRPGASQPQAPAGTDTP

SEQ ID NO: 1647 - DNA, 105727 bp, Homo sapiens
tctgttgcccacactggagtgcagtgtcacaatcagtgcttattttcaatagtgattgtgttctatggtattaacatagggcactttctaaatttcttaattgtttagggaccataatctaaatcaaaattcagataattgagtgagtaattttactgtatgcagaggccactagtgaaattaaaaaatcactgaacacagaaaataaaacccatggtcattgtgcaaccctcatttgtcttcttgtgtaacatatttaatttcttagaagagctggtaaaactcatttaaaagaactgctgcttctcatatcgatatgtttctcaagcctggtgagcagcggtccccagcccccaggcacctctggttgatggcctgttaggaagcaggcagcacagcagaagttgagcgctggtgaagcagctttactgcctgagctccacctccgtcaggtcagcagcgacattagagtctcataggagcacaaaccctattgcaaactatgcatgggagggatctatgttgcgtgttccttatgaaaatctaacttattgcctgatgatctgaggtggaaaaatttcaccctgaaaccagcctcctcatcccctccccatccatggaaaaactgtcttccatgaaaactctcccaggtgccaaaaagattggggaccactcctggtgcaggctgaatcttcccagtactcttaagggacacagggtgtggatggggcatacgtgatgcacagtccagcattcttatgtttccaagtctgtgcaagatgtcaagagctttatggcatctaaacttcttttgcatcatctaaaactctattgggtaatttattgtccaattcagtaaactagtagaatcacatccagatgtacaaaacaatactctgaatgcataatctctgttaaatctacccatgtggagaaattcagcctaaggtaaaataatgttcctcccacttggtggatcaccctcaaaatccactttccaaaagagtcctcggaattgtgttgacgttaataaacaaatatctcaaatgctgtcaatatgcaaacttccactttcagaatctgattttacattttaccccatgaatgttgaaatcccattctgattattgcctcatggtaaggaggaggactggagggaagttattccttctttttcttgtatagggtctccctctagagaagcagtaacagtttgtccaagccatggagaagagacttttcaggaaaggagagggagaggctcatctctgtttgggcgtcaggagcaggactcttctttggcaagcccacttgcctgtgggattgcacctaatggggaaagtcagaagataacgttcctgtcaactttatctccaggcagcaaccctggagtgacaaaacatgtcactcctcattcccctttgtctgtacccctttccccttcttcctcttgctcactcatctctagcattatttatttatatttgtgtgaatttgtagggtactagtgcaattttgttacgtgcatagattacatagtggttaagtcagggattttagagtatccatcacctgtataaagtacattgcactcattaagtaagttctcatcatccactcccttccactctctcatgcttccaactctctattgtccatcagtccacactctacgtctatgtgtatgcatttttttttttttttgagacggagtctcactctgtcgcccaggctggagtgcagtggcgcgatctcgtctcactgcaagctccacctcccaggttcatgcaattcctctgcctcagcctcccgagtagctgggactacagctgcctgccaccacacccggctaatttttttgtagttttaagtagagacagggttttaccgtgttagccaggatggtcttgatctgaataccacggaaacgatatgccctttttggtgcatcctactgagaggcccagaatgtctgtgtgtctgatactcgccatgtgaaccttgaccactgggttaagttgatgaaatttctacactgtacactttgatgaaatttctccactttatagttaccgtctttcttgttgtagttcagtatcttgggggagactatgtacattccattccccccaaaatttcacccactaatttttgcctctactgtgggattgtgtctgcagcctttattcctggtgtttgcctgttggcaatgtttctatcttcatttcttcattggaattctgtgaagaagcatcatctcttctccatttgtttattgatttttgccattactaatatcagcatgatggatattctattctgtgggttaaaatctaatatcatcctttattttgttgctcaaattattccatccttggcaattaggagctccttcaggttgggtcctgtttggacaaattccttccttccttccttcctccctcccttccttctttccttccttcttttctccttcctcccttccttcctttcttccttcctccctccctcccttccttcctccctcccttcctccctccctcccctcctttccttctttctgttactacctcttcactttctggtatacaagatgctccaggctcgtcttctatgttctctgccccagccctggagtcagtcacttcccctgagaaccctgatttctattactggaaattggagcttagggaccaagctctgggcacaaagcatgctcattgttatagggtgtcattgtttggctgctctgatgagcagagcccatttaaattttgtcagttgtctgagatctcctgtgtgcagggtcctgtgtggccctggtgcagcaatgatattctacctggtgtcttgctaatggaagctgctgggttgcagatgaaggaagccccaaccaagccccaaccaggctggttggttgaaggaagcccactaagcaagagtggcagtggcaccccctcagtgagggtggcagagggacctggacctgacccaccacacagtgtggggaacctggaagtttttctgggccccaattccctcttggatggaacttgagcttgtgctagatgaatgtggagggcaggatccttgaggtcttccaggcccaagacgtagcacatagcaagatccagtggtccagtgtgctgtcaccaccatcaccctccactgggcccttggccaggcctgtggtctccctaaggtgcaggagcaatggcagcagcccctcgaagagctactgtagggctgatgccagcatgcacgccagactcttgggagagggttggagcatggagttcacacagcacagggaactgtggtggggaccttcactctggccagtacctgaatgtgaacatcagagcatcctccaggacaaggaggggtgaggtccatgttgtccccagggtcaaagagggggtagttgtggagatccacactgggttagggtagtgttgggctgcagaggtggagcagagagctggaggatgttgggatcagctgtgttaaagaaaaaatattcctggtgctttttaaaaccccataaggccaactttgttcaggcccattgagataggtacagggtcttgtagtgggagagagatatttggctcagttccaaacacagcatggacaactggggattgagagccaagagcaggttgggggttgccggatggagaatgacggagggaaaacagcagggggaagggccattctggctcaagccgcctaacaggattgttgctgaaagctggccacagcgaccagacagcacccagggtgtggtaggggatggggagtctggccagttagtgaaggtgaccagatgactgaggatggggtattctggctaaattgatttagtaggatccttgataaaattggacaatggaggccaggtgctgtggctcacgcctgtaatcccagcactttgggaggctgaggcgggcggatcacctgagatcaggagttcgagaccagcctggccaacatggtgaaaccccctctctactaaaaatacaaaaattagccaggcatggtggcaggtgcctgtaatcccagctacttgggaggctgaggcaggataattgcttgaaccctggaggtggaggttgcagtgagccgagatcgcaccactgcacctcagtctgggcaacagagggaaactccatctcaaaaaaaaaaaaaaaaaaattggacaacgcagagacaaacatagaaatccccaaatcagggcttggttgaaagagagttcagtggagcctgagtagagtctagttaaggagagaaccttgtcagctgccctcatggcttggggcctggagtcttctctcccacaaagtccagatgtcaaagctaagaggacaccaggccggggacttgactgggcttctgggtcccctgatgcaaagtggaaaaagtgtctaagttgaggttttgtaacacgccatttaccaaggctgagttggcactggtcttaaacagcatattcccagaacattgacaggcggatgctgcccttaccatcattctgccatgggcctatacacagaccagcagctgtgggcaggcagcctgcctcagccgggtggaaacactgtgtgtttccctgtgtttagttcccgtgggtttgcacagctggtaatgataggattggggatctgggatgcatcatcccggagtgctggagccttgggtggagctggaaagtggagctgcagggacagagtagggaggcagtgaggccctgacagggagggccctggtggcaaggagacatcatttcatcattttgcaagtgaggtccccccgagggagtttctggagcagcgcaggtgtcagtaaagcatctttcccacattctggatgcctggcaggtctaccctccctggtgtcccttacctggctgtggcggccaccagcactctgacctgccagcatcttcaggtctcagtgctgtattccaagagccatcgccactgaaaattaaaactgccatcccctccagatgcagtccagagggcaggaggggcaaactggactaggtagcggggtgcttcttgaggccacctggggaagagcattctctttcagggaccctggtgtccccaggggctgacagggctccaccgattcagctccagagcctaccagggctggcactgaggtcagagagcccaggagtccaggaaggagaatcttggagctcccatgtccagggacactcactgcccaccctcacccagaactgctgctcccgaaggattttacacatcgctgacggagatgagccaagtgggacaagcagtctccatgactggaatagaagggctgctgtggggcgcccctgatggccagctgtggggccttgtctgagccacaccctcctctgagtctcagtttcctcttctgtggaacagaattaatgatggaccacccaggagcaaatgatatccttgtgtgagggcctggcacgtacaaagtatttagaactatgtattcatcatatattccatgtacagatggatatgcagttatttcataaagagttcttatttaattccaatttaatatgtaatactttactccttccttttgaccagttgctacagaaagcaaattctgttttgtggtgggctttcacctcaggccactgattggtgtgttatatgttatataacatataacacagcacagtgtgttatatgtctatgtaggctctcagagggaggctgccattcctaggctgctgggccctggcaggtcaaacacagccagtgccctgtggccacgtgcccagatgctgaagcttgttcctggctcagcagtttggaaacagttggtgccaccacctgttccttctcctccagaatcagaccggagggtggaggctagcaggagcgggtgtgagaccatccgctggagtgacaggaagctgcaattgatgcttctcctgtgaaatgtcacaagctcatggctgaaagttgcaaagaatggagagcatgtccagccctctgggatgaggcactcacacctttgtgctcctaggtagcaaaggaggactatcttattggtgtgggcagccgcttggatatttaaaaacccaacaaataaagcttggaattgaagtgtttcttcatttttctgggggaaatccacattgctcaaacctcaagtgaagacaccttttctttggtgaggcttttttttttttttgagatggagtctcactctgttgcgcaggctggagtgcaatggcgcgatctcagcccactgcaacctctgtctcccaggttcaagtgattatcctgcctcagcctccccagtagctgggattacaggtgtgagccaccacactgggctaatttttgtatttttagtagagacggggtttcaccatgttggccaggctgggctcaagttcctgacctcaagtgatttgcccacctcggcctcccaaagtgctgggattacagtcataaaccaccacgcctgtccttgctgaggcttttgaacacaaaagttgccatgggctcaggccatttagggctgagttccatggtaacacgtggccaacactttccgggcaggccagggaccacgttgtggggcaggacttggggctgaccctggacatattgcagctgtcactctccttagtgttttaggagtcatgaaacagctgttctctgagaggtgtgtgagttttgggtgagaagacccagatttggataattaaatgacactgcctagggaaagtacctggaacataatggatacttagaaaacaaaggaaattcctttttttcccccccggttttagtttattatatattactttttttttttttttttgagacagagtcttgctctgttgcccaggctggagtgcagtggcacaatctcggctcactgccagctccgcctcctgggttcacgccattctcctgcctcagcctcctgagtagctgggactacaggcgcccaccaccatgcccagctaattttttgtatttttagtagagacggggtttcaccgtgttagccaggatggtctcaatttcctgaccatgtgatctgcctgcctcggcctcccaaagtgctgggattacaggcgtgagccactgcacccggcctattatacatttctcatcacaacaaaagaaaacaagaagaatatttgcacagagtcccaccatgtactctgtcccctccacatgtgcagaaatagttttgaccaggtggtaattgcagctttcatgattctgttttcattgtttgcagtgttttcccatgttgccacataacactcctgattattttaacagccacatggtattttgtgcatcagctcttcaggagcaaaaaaccatttagtgagacaacagcatttttcctagaccacgagtctatgtttttatttgtgggatttttcccggcatagcgaaggccagatcaggacagctagagtgtggaacccagagctgtctccacaggaagggatgagaagcacaggattacctgggtcccgagagctatccccgggcattgccttttggtccagacactgcgtgggaagtcacctgccatgtgggaatgtagtgaccaattggcagccccgtgaggctgaccctgtgggactggggtgcaggctgcctgccacactgctggttcttgcccaacacaagtcccaagaacaaaccagaaatgcggacccacaggaggtcctcagcttgacagacctgcgctccccttgtaagaacaaggggtctgggccgggtgtggtggcttacgcctataatcccagctactctggaggctgaggcaggagaatcatttgaacctgggaggcagagatggcagtgagccaagatcacgccattgcactccagcctgggcgacagagtgagactccatctcaagaataataataataaaaaaaaaagaacaatgggtctggagggtcttgggtccacatgctctgggtggtatgtggtgtcctgggtttgcaggaatttctctgtccctctgtaagataggcgtgtgagagtgtaaaaatgagccattgttcatggtgccttgagactatctgggcagagtagggtctgtggctcagggcttggtgagagagaggcccccatcggagaagggaaaaagcgctcgattgctgatttccacccatgtctacctcctgtcagggaccgcaagggcaaagagtagagaagcaccagcaaagaactggctgggacccaggaaggacagggtgggaagaatcccatggccataggagaacatttattaaaagcaaaaatgttgcaatatgtttcagggtgagaaaaacacacctaaaataacaggcctggtagagtctgattaaaaaataaaaagcacatgtaaatactggagtagtagaatggtaccagctggcatgaacagagcaatgagcgggagctgggccgtgtgtgcatttgtgtcccatggaattctctggcaatgctgaaggaggcccggctagatgtagatgtccactttacagctgagggtaacaaggcccctcgcttgaggtgtgggccgaggctcggacctcggttttggcacttagggacatccttttccttcaaaatgttttctcttcattgctttttttttttttttttttttttgaggcagtctctctgtcacccaggctggatggagtgcggtggtacaatctcggctcactccaacctctgcctcctgggttcaagcgatttgaacatcatacacatactgctgagaccagctctgtccgggagaccctaacccagcggcactggaggaattaaagacacacacacagaaatatagagtgtggagtgggaaatcagggggtctcacagccttcagagctgaaagcctcgaacagagatttaccc[450 bp omitted]acatatacaacacaacacataccacaccacacaaaaaccacaaaacataccatacacacatcacatcccacatacaacacatacacacaacacacatacaccacaaagcacattacacacaccatacatcagatacactatacacagcctaccacacatacacacaccacatatacatgccacacgctgcacacacaccgcacacacaagcatgcacagcacacacacacacacggcacacacacgcacatgcacgcacagcctctgcaccaacacctctttaagcaagtgcctattttccactccaccctctctaagcctggaggaaagtgcacacacctaaaaaggggtttccttgtggtgaaggagcaaagaaagttactgctgccccaggaccctctagaaagtctggcagaggtaatggctccgggcagaggtgtcaggaaaaataaacagcatttcccccttggcctaagggacccgctccgccctcagcccccagcccttgttgtcatggagagcggcctgtgcacccgagccggcgcccctagccctcccactggctctccgcaggcggctttgtcagggctcagcgtccctgcagctgccgggagaggaggagacagggcggctgcctgtgggtgccgcggaccttcggggcgggccagggaggcgggaccgctcctcagaaccccaggggcttcagtcctgggctgattggcgcgggaagcacagcccggccctccaggtccccaaggagaccccagcctcctgctgcccactgtgagcgacctccccggggctcctctggaagcggctccggcaagtatcgagtttgcctgtgcggagctgggggagcctccggctttcctgtttgctttgttaattattttcgtccccagaggaaggcggtgagtaggttacattggaaaaggtggcaattttcgcttgtttcaggtggctttgagatcctgtgtgggctcatttttctgggtgtctgcggctgagcagggcttctccagggggcgggctggtgagacccttctgcagaaggaggaggtgactgcctggtgtatactttgaagaggggttttaatcagctttctgccccctcctgagcacagcccagtggagactgagctgaagaaaaccaccttggcagtcctcgcggtgggtcctgggacccccggctcgggaacaggattctccaggatacctactgaatgattaagtgctgggctggactgtgatgagacctgttttatttctggacttctccacccttccccattcttcccatttcttttcaaatggatgggaaaggaaaatagtctgcttgaaaaaaagaacacatatcattgcctgggcgattgccatggcaacggggaccccatgtcggatgctgagattgtcttttctttttgttaccttattcttgccactcggcatttcccctaagtgtcacttctcataagggagaatataaaaccagggcgaaagcgggtgctttggagctgctaggcagaagtttgaggttcattaagacctccagttcttcggatagacatgggccgaaagaggccgcaaggctggccgtgtccctttttgtagttcgtgcctctggtccttggggatccatgttgtcccggctctttgactgcatgtttcctatgctctgtgtctgtgaattagggcagttagaatgttgtcattttctgggatggctgggaaatacaggtatcattgcctaaaatcagtttgaagtgtaaacaatgagtgcgtgtgtgtgtgttacatctatgtatgtgtgtgcacaggatttaatgttgtgaactattaggatgacagcaaactccagccccagtgaggttgaccctctttttcatattgtgcagaaaggttaaacatttctcaacagcagggaaacctggctgctttctggccactgtccatagctcttcttcccaggcccttgtgttggggcaggggtggtcagctgaaggccagctggctttggacacaacgccttctctgtgttgtgcccagggtcccagctcattcactgagagttagcagctcacaccatctgttctgggattgggctgtgtcccaagtatccctcctcatcctcaaacctcaggactcactgggcagaggttgggctgggactggaggcctcagtttccttatccgcaaaatgagggttatgacagctcatcccttgggcctttagttgggctcctaggggactgcaggcttcttcaagcccatcgtggtactggcttttctctggacaccccagagagggggtcacacatgatctgggggaggtcagagcaggatgcatcctcctgtcaccatgaagcacatgtgctgagggactggtgcctggaaaggggagcagtgtggaaggaaatctggcctcatcccgtggaccagtgcctcagtttctccatttgtaaatggggctatgtgtcacccactggtggcttgctgttgggtgaaagagctgaggactgcatttttgctgtgtgtgacctatatggaagcctgtcatccatgacagtgtctgacaagcgcctgccagtctgcagcggggcgtccgtccactctggctatggggacatgtgggcccatttcctcatcatccctgcgtgtcccttcccaagctcatgagcaacagtgctgactcagtcctgcagcatcagttcagtcttggggtgtcgtcattctccaggacatcccaacgagggatatccagcagccttccttgagggtcccaccctcagggacaggatgggtttgggtggtagccatagctccacagtctcaggttgcccagggccaccaggcagcggctcttggccctgagtgtatctgtgtggtccaagaagaggcgaggtgcttgtgtgtgcagaaatgtgccaggaaggacaggggagactcaggcttcctccacaacacccctgttcgagtgtgccagtgaggggtggggctcccttctcccaccacaaccctctgaggagctctccctgtcctgctggccaaggagccctgtgcctaccggcagaggctcaactaaccaaccaactaaccaacagctgaccaactaaccaaccagctaattcatcaactccctttctcttctctgttttctccttttcctcctactccctccttttcctcccttccttcccccctcccttctttccttcctcttttttttttctttttctcctcccttcatctgttcacctgttattccaggaaggatctggttcagcatagagtgcaaaggataaaaagaagcaggtggggccaggcacagtggcttacgcctgtaatcccagcactttgggaggctgaggcaggtggatcacgaggtcaggagatcgagaccatcctggctaagacggtgaaaacccgcctctactaaaaatacaaaaaattagccgggcatggtggcgggtgcttgtagtcccagctactcaggaggctgaggcaggagaatggcttgaacccgggaggcagaggttgcagtgagctgagatcgggccactacacactccagcctgggcgacagagcaagattccatctcaaaaaaaaaaaaaagcaaatgggtaaaaagtaagagcaggaagagcaggttggatttgccagacagaacttgtcatggggatgacgaagtctgaggacactggggaggctccagccccacgcagcttggcagtccttgctcacagaggccaggactgttccgtgcggattctggacttggaccaaaactcctgggtccctgactgatggtggggaaagaagggggcaggaggggttcattcaaggctggcaaatgtagcccgagtcccttctgacccctggtagggccctcatgaactgtggaggctgtggtagtctgtggctagggtgcctggtgacatttggtctaaagaattaaatccagtgcagatgagtccacccaggaggaatctgtggacgacagcccctaagtgacctggggacggctcagggacagtgctgccctttctgcctaggcagatggaaatggagccagggtccttgttgtgccacgtcccctgcgtccagcactggagattggcttctccccaagatctggctgcccctggcctgcttgggccctgaagagaatgaggagaggcaagggtgcctaggagaaaggtggtagaggtggtgggagccctgcaggctgagggttgtggccaggggctgctgagacaccaggttgctctgggggtcccgctctaggtctagtgtgttcatgagggaattccaaccggcctttaaggaatgtggggcttttagaaggaaaatggtatatagcatactaatatgtgcttgttgaatgaatacatgaagaaggccttttatttttctagttactgatatccagtaattctaagtattcctagcttgtcttctctgggtaaattactttgcttctcagaatatgccagctagacacaacccataaggtagaatttttcattgaaatgtgtcttacgtggaacttgtaacttcctaaaataaagttgtgtagccaaacaggatggctcatgcctataatcccaacactttgagaggccgagatgggtggatggcttgagtccaggagttcaagaccaggctgggcaacattgtgaaatccttgtctgcaaaaaatacacaaataagccaggtgtggtggcatgcgcctgtagtcccagctactcgggagactgaggtgggaggattgcttgaacccagaggttgaggctgcagtgagctgtgattgtgccactgcactctagcctgggtgacagagcgagaccctgtctcaaaaaaattaattaattaatgaaagttgtgtagattttgccagatgtagggttgtgtctgagcacactcatgttcttggtccttgaaacactggtgcctgaaggattcatgtagctgcggaggtggtaaactgaatgaataaaactgctggtctttgaccatgcaaaataggtgtaaagtaggcttggggggatctcagtcagaagaccctgactttacggctgcagagaggatgcctctgtcccccagctccagggcagacaaaatctgagggtctaagatcttcagtggcaaaaggggcatctggttttttgaccctctccctgatcttgcttttaaacaagttccaaaatattttgtctgcaaaacaaactatgctgcataaggaataattcgtggccctaattcatccattagagaccacacttgactccccaagggcttcttaatatccctggtttccaactcatgtgagtcaatgcagggggtgaccagagcacatctctgtttattttcaagtatgcaaaggatatatacacatatcattgttgaaagtcaatttttttttttttttttttttggagatagagtcttgctctgtcgcccgggctggagtgcagtggcacgatctcggctcactgcaagctccgcttcctggcttcaccccattctcctgcctcaacctcccaagtagctgggactacaggcacccgccaccacgcccggctaattttttgtattttttagtagagacggggtttcaccgtgttagccaggatggtcttgatctcctgacctcgtgatccgcctgcctcgcccttccaaagtgctgggattacaggtgtgagccaccgcgcccggcccgaaaatcaaactgttttaaagctgaaggcccccccatcccatcctctaccctccaatcctaaggccctccttaacattatgaaggttgagcaagtgtggctcaaatctctccctccttccccctctttctccttctcttccttcctcactccctcccttctttctctctttccttctttctctccttccttccttttctctttccttcccttttttcctccttccttcattctttcccttttttcttctttagaatagtgctgctgtgatcacccttaggtgcctccagttctaagctttctgattacttcttcccccgaggtcccccagctcagcatctgcccttaaaggaaacctaaataaacatgtgttgttgcattctgaatagcctctggttgatcaggagcttagactaaggattgaatagtaaacggtggatccaagtgattgtgagaataccacttggcagaatgtgatgtctggattggacatggagtgcataggaaaggacccgcacctccctgggcatatgagtgtttctggttgacgctgtgcagctgccgcataacaatgctggaattatcctttattcagggcctgattgagtgggggcgtggccacccctttattgccttattttttaatgtatatcattctctatttacacattgataattttttcctacagggtaaaaaaaaaatgcaccagatgcagcacttttgtgtaagtatagacacatcagggctctttgttaaggataagaaacaatcgcttccacttcaggctctaatgttatcatagccaactgccagagccgctctgtaattacgtctcctgagtggaaagctctcaaaatgccacttggtctaagagtttgaagctgggcttgcctctcccctttggccaagatgactaaagcatcacatatttttaaagcaacttttaagaaatgaggtatagtgagtgatgactagccagcttctcgctgctcacactgtagcattttacacacattttcccagggagcccccaggaacttggtgtccagggatattttccccatgttggggtgaaggggctcacacaatgtcacctgcacacgggcctcacagttccagatctgggcttgtccactctcccagctgcctgcctgggaggaaggcaggtaaagttaagggcagtgccaaggtttaggaaatattgtctgcctttggaccaaatgtaatttcaacttaaagtaacctagaaaatgttttgcaaaaaatgtgttttcagaaagcagaattacactcagtatcccttctttttttggtttctcaaccacatctttcattagagagatttaggacagctaagtagaaattaaattttccatatgtaaacagacatggagacagctggctttcactgggcaatagttcccggctgggaatctccaatgaacaacttcgattcttgtatttttaaacaggttggctttcctcccaaatgcaaatataatgttctacgtagaaatttatatgttactgagaagcatcaagaagcaaatgaaaattcccggaagctcaccacccagagacggtcactctcagggtttcacacagcctctctgccaggagctttcatttccttgggtcttgtctattgttaggtcacatgttgagtaggatttgtcttggagcctgaacgctgacaaaggtgcaccacccttggaccccatccaaagccacacaggaatgactactctggtcccacccacttcctgccctagctagtgtggtatttttgtggctttcccctgtcttgtcagaagaatgagagtaactcaacatgggcactttgtccaatccttgggtctcaagggttctgggaaggatccaagagctgtggttctcggttcccaaaagcaggcaggtgattggagaagcagccgggctctgagtcctgtgcccgtgtggcccaagtgactggctgtgaccctaataagtgagcagaagggcaggggccggggtcaccttgcacaggaagtggcagccatgagggtctctgcaggccagagctgctccttcctcaggggccatctcccaaggattcttgtgtcctaggagccgctcagcaaatggttgttgactgactgagtgacggcactttggcctctctgaacctcagtgtcctggtcattgaatgggactcttacttccaagctctttactcccctgagccctggcctcctggttcccctttgtcctgcaccttgggctgtgtcctagagaccagccacctcagctgcatcttgctaggctctgagtatcgtggccttgacatttcctccacctctctgaaccacagctttgtcttctggaaaaggagaaattagaggatgcttggagcatcgttgcctgcattcatggaactcacggtctgcctggagagtgatggcgatatggtgtctatgtgtccgagagccagctgcacccagagggaagctctaaagctggtgtggtcaggtggccaaggagcagagggaacagacgtgagaggcaaggcccgtgagggtagggagaggtgctcccaatcattgtagaggccaggaatgaggctgggaggctgcaagggccaggttccagccgggccaactctgagatgacgctgaggattccagctttactgtgagtcacttgtaggctcactgcttctcttaagaggcaagggatggccaggcacggtggctcacacctgtaatcccagcactttgggaggctgaggtgggcggatcacctgaggtcaggagttcgagaccagcctgaccaacatggagaaaccccatctctactaaaaaaatacaaaattagccaggcatggtggtgcatgcctgtaatcccagctacccgggaggctgaggcagcctgggcaaagagagcaaaactccctctcaaaaataaaaataaaaataaatagagccaagggatgccactagctagttgtttaattaaactttttattttgaaatgactgtatagacacataagagataatgcagagatactgtgggcctttacccgggatttcccagtggtaacagcttgcaaaacgatataggaccatatcatagctcggaccttgacactggtacagtcaagacacagagcagcaccagcacagggagcctcctgtggccctttgatgtccacctgctccctgcctgcccctgacagcagccaatctgttctctgtttctacaattttgtcattttgagaatgttatataaatggagtcatatagcatgtaatcttttgaaattatctttcttccaccagcataatcccttgggattcctctaagggaattcatgcaggggaatcatcacacatctaggctgctgtgtgtgtcaatagtgtttccttgttattgctgagtgctgttgtgtggcatggatgtaccacagttaatgtgtaaatgacaacatagttttcatttccatgtctgcatgttcattgccagtatatacaaattaaagtgatttttgtgacttgattttgtatccctgaccttgctaaattcacatactagttctgggagttttgtttgtttgtttgtttgtttgttttcgcttcttggcattttctttgtagacagtcatgtcatttgcaaacatggacaattttatttcttcctttctgctcagcatgcattttcgtttctgttcttgttttattgcactggctagaaccttctccactgtgttgaataagagtggtgacagcaggcatccttgccttgttctcactttgggggactattatgggcctgactatgtccctgcaaaatacatgttgaagccctaatccccagtacctccgaatgtaactgtgttggagacagggcctttaaagaggtaacaaagttaaaatgaggtgctgagagtgggtgctgatctgtcatgactggtgtccaaaaagaagagctgaggactcacagagggacaaccacgtgaggacacaaggatatgatggctgcctacaagccagggagagaggcctcaggagaaaccaaccctgccaacaccttgatctcagagttccagcctcctggaatgtgagaaagtaaatttttgacttttcagccacctagccagtgggactttgttataataaccaggataaactaagacactgccttccagagtaccacagggcacctctgttctgacttcagaaactagttctgcctgtctttgaacttcatctaacagtcttttgtgtctggctttgagatccatccatataattgctttctttttttttttttttttttttgaagacagagccttgctctgtctcccagtctggagtgcagtggtgcaatgatagctcactgcaaccttgacctccggggctcaagcagtctcctgcctcagcctctgagtagttgggactacaggcacatgccaccatgcccagctctacatcattgttatatcagtggcttactcctttttattgctggatcctgttccatccatattatggctgcaccacactttgcttattacgcattctccagttgtcagacacttgaaattgtttccagctttgagttatgaatacagctgttctgcacatttgtgtacaggtctttgtgtggacagatgttttctttcctcttgggtagatacctagaagtgcaattgctgggtcatagagaaggtgtatatttaactttgtgagaaaatgccaaacagttttccaaagtggttgtacaattttctgcttccaccagcatgagagtttcacactgagagttacgtttgctccacatccttgccagcaggtggcattgtcagtctttttcactgtagcggttcagatggggctgtaatcattcctcagtgtggtttttagtttccctgatggcaggcagtgttgcccaccagctcatatacttattgtctatttaggtaacttaagtcaagtatatgttccagtttttttttctcattttaaaaatggaatcgtttgtctttttttttcattgatttgtaggaatctttttgtattctggacacaaatcttttatcagatatatgtattgcaaatgttttctcccaatctgtgatttgtctttgaaattttcttttcttttttttttttttttttgagacagagtctcgctctgttgcccaggctggagtgcagcagtagcatgatctctgctcactgcagcctccacttcccaggttcaagtgattctcctgcctcagcctccagagtagttgggagtacaggcgtgcaccactatgcccagctaatttttgtatttttgtagagatgaagtttcactatgtgggccagcctggtcttgaactcccgacctcaggtgatctgcccacctcagcctcccaaagtagtgggaatacaggccactgcacccggccgcctttgaaatttttaaaaaatatttaattttttttttttttgagacagggtctcattctgccacccaggctggagtgcagtggcatgatctcggctcactgcaacctccacctcccgggttcaagtgattctcctgtctcagtctcccgagtagctgggattacaggtgcgcaccaccatgcccaggtaatttttgtatttttagtagagacagggtttctctatattggccaggctggtctccaactcctgacttcaggtgacccaccctccttggccttccaaagtgctgagattacaggcatgagccaccttgcccggccttaaagacttaatttttttatagcagttttacattcacagtaaaattgagagaaaagtacagagatttcccatatattccctgaccccacatattcagagacactctctttatcaacatcctccccagaggagacatttgttacaattgatgaacctgcactgacacatcattatcacttggagtctatatgtggctggccttttcacgttcctaatggtgccttttgataagcagaagttttctatgttgatgaaacatattttcaggttgaagaagttgtttataaagttttttttgtgtgtggcttagtgccttttatactctaagaaatcattaccaaccacaaattcatgaatattttcacctatgtgtttttagaagctttacagttttagcattcacaattaaggtttggattcatttctagctattttctgtgtatagtgtgagtaagcagtcaaggtttgtattttggtacggctatctaaatgttccattactatttgttgaaaggacgtatctttccctattgatatgtactggcaccttcattgaaaatcaattgaacaaatgaatgaaaatctattagttcattgatttccattgatttatccttatgtcaataccacattgtcttgcttttgaaatttattttattttattatttatttagttttgaaatggagtctcgctctgtcgcccaggctggagtgcagtggcatgatcttggctcactgcaacctccacctcccaggttcaagcaattctcctgccttagcctctccagtagctgggactacaggtgcctgccgccatgcctggctaattttttgtatttttagtggagacggggtttcaccgtgctgcccaggctggtcgtgaactcctgacctcaggcaatccgcccaccttggcctcccaaagtgctgggattatatgcgtgaaccactgcgcccagtcaaaatttattgtattatagtaattattttattaatgaaaataattactataataaaattattttagttaataaaatataattactatagtaagtcttgaaatagggtaattggttgaactagttctctgttgttggaccttcagcacatctctgacattgggcaaggctcggtgggtggctcatgcctgtaaatcccagcactttgcagggctgaggtagaaggatcgcttgagcctgggagttcaaggtcagcctgggaaacatagccagagtccgtctctgcaaataataaaaacttagccaggcatagtgccacacacctgtggtcccagatactcaggaggctgagatgggaggatccctcgagcacaggaggtcgaggctacagtgagtcatgatcggtccagtgcatttcagcctgggcaacagagggaaactcagtctcaaaaaaaaaaaaaaaaaaaaaaaatcagccctaataagactgtataaaatgtccttgctcatttgtgtgggtgttttggaaggtcgatggctgaagcgagtgtcccttatgtctgcatgtcccatgtccttgtgtccccatgcccccatgtttccaagaccacacgtccccacgtcccctgtacccccatgccctcatttctctatgtccatgtggctccacattcctcatgtctgcgtgttctcattcctcatgtccccataacctccacatctccatattcttcatgtccccgtatccctcacgtccccgagtccctgtgttcccatgtctccatatccccatgtctccatgtcctcatgccccatatctccatattcttcatgtttccatgtcctctttccccattttctcatgtcatgtccccgtgtcttcatgtcttcatgtccctatgtcttcaggttcccatgtccacttatcctcacatccccatgtctccatgacctccacttcccatgctctcatgtcccaaaatgcccatatcctcatgtcctctacgtcctgttgtcatgtctgcatgtctgcatgtctccatatccctcgtgtccccaagtcccccatccccatgtcctcattcccccatgaggacccctcctatccccacgtcctcatgtcacccataaaccagcccagagcagagtttgccttatgctgtgtgcttggtaaatatgagctgccttcctccttaaaccttccattcaaaggctgcagaataaccatgggtaagatggcttccctgaaaaaatgcaccccaggtgtcactactagacgtcagatggacactttcccccacagcggataaactggtagcaaccctgggaaggaatggggtgtaacagccagggccagctgggtgccgtaacagtcccaggcttagtcatagtgcagtgctggcaatgggagagttgtgggggctctgttccttgtagtcagatggggagcactcacccaccaggacagaggcccagggagagcactcatccaccagggaagagcccctaggccagctgagagaaattaggccaggggctgctgaacagggtagagcccctgggcttccctcctggtaagtgggtgttcccccttggcctctctcccagtgggtgatccccccgggcctctctcctggtgggtgggccctccacccaggcctctctcctggtgattgggtgctccccctggggctctctcctggtgagtgggtgctcttccaggcctctctcctagtggggtgctccccctgggcctctctcctggtgggcgggcactccccctggctgacagttctctgcccataggctctctccatcctggcctctgtggtcccacacaggcccctctgggtcctggacttcagagctcctctccctggccatggccagctttcctggaagacaggactgggggtccctgggacaaagcaggagtcctggggaaaccccctttctcatcagaggcacccacccctcatgaagtgagccacctgggggaggatgagcagcacccttgagggacaggctaagggacactggaggcacagggccttctctgcagagcctctgactccacaaagttattcaagggctttgagattgaatagcaccaatggattgtcactgtggtccccaggagccctccatggtcaccaggagtcctccggggtagaggactcatttgagccattggaacatgagtgaaataattggtcagagaaattggaatatgtgttgatacttcctggtggttgcttctccactgtgggctgatcccaccattccccaacttcaggtcacccttgccctttttcatgatgaaaatactacatcactttaaaacaataggaaacacttaactctttagttttgatgggtcagtattggggtgtggcttggctatggcttggggacctctcatgaggctacagatggtggctggggctgcagtgtcatctgaaggcctgactgaaactgaggatcattttcaaggtgactcattcacacatcacaagttgttgctggctgttggcctggggccttagttcctctccgcatgggcctctctgcagggctgcttgagcatcctcataacatggcagccagctcccccacagtgagtgattcagcaaggaaaggcaaaagctgcagtgttatgtatggcctggccttggaagtcaccttcatcatttctgtaatgtcctattgtacagtagtgtccacaggtcagctctattcacagtgggagaggcagataaccagcatttgatgatcactgggccattggggggcaggctgccaaaaacatgtttctttttgaatgatgtcactcccaggtggaggcaccacttcctcccactcaccccaaccagggacgacaggacacttggcctcagttctactttcaagccacaaacccctccccatcctctttttgttccttacctaccacaacccctcacctttcaggtcaccacagccagcctgctgctgtgctgccagaatttatcatgaccctcttaggacgacagttgtgtattcctagtgtacctgggtttgtgtccctggtcctaatgggaccccactgctggccttctggcacaggggacctctgtagaggagaaggctgaaccaggtggtggtggcaggcactgctgtccttcctggcctgggctggaagcatctggatggtccagggctgcctcctcagggggcaggagccaagactccagggccccggcattgacagcacagcaacggtgattcagatgttggtggctgggatcccttgagtacctaccataggcaaagccctcatttctcacaaaaactccaccacatgcatcccacattttctccatttcatggaggaagaatggagtcttcaagaagttcatcagtgtccgggcatggtggctcatgcctgtaatcccagcactttaggaggccgaggcagacagatcacctgaggtcaggagttgagaccagcctggctaacatggtgaaacccagtctctattaaaaatacaaaaaattagctgggcattgtggtgggcacctataatcccagctacttggaaggatgaggcaggagaatctttgaaaccagaaggtggaggttgaagtgagctgactttgcgccactgcactccagcctgggcaacagagtgaggctccgtctcaaaaaaaaaaaaaaaaagaaaagaaaagattaagttcagcaatatggctgaggccacagcacccatgcgtccgagctcaggtgacactgtccaccccatccttgtcacggctgggtgtagctctgcatcctcacacaggcagggaacttagggacaaactccacatcacctcagcctttagcttttgggagggaggggcacaccactgtgtcctgagcctcagtttccctgttgtcagacggggataaccatacttcacaggggcatgaaggggcccaatgagtaaccattcacagggcacctgcggcagcacctggcacagggaaactgaggcccagagaaattgcttttatttatttatttattattttatttttattgagacagtctctttctgtcccccaggctggagtgcagtggcgcaatctcagttcactgcaacctccacctctggggttcgagcggtcctcccacctcagcctccttagtagctgggattacaagcatgcgtcacaatgcccagctgatttttgtatttttagtagagacagggtttcaccaagttggccagactggtctcaaactcctgacctcaagtgatcctccctccttggcctcccaaagtgctgggatttcaggcatgagccaccatgcccaggtgagaaattgctttaaaaaaaatgaatataagcctggattaacaagcattattaaaattgagtcagactttgcactctaagcccttcaggacctggtgttattatttattgattctctccctaaaacaatgagggtgccctcctggtggggctgctcagcggggcaggtgctgggcctgctggagcagccctcgtgggtcaggtctcccaggaagcatcttgaaatatctgtttgcagggggcctcttcaccttctaacttgtggccatttcattgttcccaaccaagagggtctgaggaagcctctgatggtgtgtttctgggctcactctgggcttgtctggtctagggccggccccctcattccctgctgggcccctcctccctgaagatctacacagcagatctactcacaaaagtccacccagcagaagcaggaggatggtggttgtgggtcctctgtgagcagccctgttaacctttaaaccagcacggccgccgcagctgtgagcctagcacctgatcagtggagagctgtggattgcatgtttgtttgccattgcccccgccaccctgcaagttgcaccttctagaatcagcaagccaagctcctctcacccagcgtaatgatgcggaaatgcaaatgcaccatcatgttgtgacccatattgcgaaaattagaaaaaaggaagttgtgtttcgctattgcacgaagttcagcccagaggagaaactcgctcgccttcagaagacaggtgagtgggcttggtcctgaggtgttggccgagccctgagatcctaactgcttttgtggaactttggggtggtaggaacattcagggcaggagccatttgagggagacggatgttttcaaggcaggaagtggctgtggtggcacggaatggtgtcttgtttttgttctgttgtctttctctgggttcctgtagcatgatgtgtaaaaattcagagttattgtgggcctcgaatggcaagtgtgaaaagcctttgtaaactgctgagtgctgggacagtgttgcctatcgtctgggggtggcttaggctctcacaagatgaacggtgcctgcccgtgtccccatcgaaggctggcaggggcctgggtccgaggctgaccagatgcagggagcctttttccatcggctggcagcgcaccagccagggcatcgagaccacggccagcccctctcatgtcacccaggcctggggggcggggggtagcgcgagccttcctctgcctgaacagaggagggtggtcccagacgtgtcctgggggctaggctttcccacacagtgtgtctccagaagcttcctctgcactctgcaggttagatattagcagatgcgggcctgtgtagcatggggctgtgaggaaggagtgctgcgcccaccaaagcctcctcagcaccccgtgctgtgcctggcagtgtgggacagtggcggggccacctcaagaggtgcatggactgatggcagggtcccagcggcagtggcggcacaacccgatgccaccgtgattgtgcccactgtgcagagggggcccgaggggcagaggcatgttcgggtcacacagcatggccacactcatctgtaaagtggtgactgagtcgtgccaggctcactgtagttcggggctggacgtgcttagcaggtgccactgccattcagatcggtgcttgccaacacccagggcggatgctggtcagccattcttgcaggggaggaaaccaaggcacacagctgacttgccctgggccccccagcctgcaaagtgtctgactgagccccagtacaaatcttcacaacttgctcagtggccccagagccgggtggggctgaccagctgggtgtgaaagggaggaagtggtttgtccccagctgggctgttacaggaggccagaggaggccccagttccactcctcagggggcggaggtccacgtctacacaaaaaccagcaccatgcagtgtgcaagaccccttggaatgacacgaggccgagtgccctgcacacagaggcctgcagccgtgttgtacagaggttagagctgaaatgaccttttcctgagaagcctcaccactgtccgaggatgggcctgaccttcctggcctgtgccccttgaggactcccaggttagtccctgggctagaagagtgacctgggagtcactggtgcatgtgctgggagctcccaaagcatcctccccacctgccccgataggtctatcaggagcctggtttacagataaggaaactgaggcccctcagtaagggcagtgctgggcaggtgtgaaacctagacaaggatgagactgggcttgtggaacaaggaggctcggaggcaagcatgtgccgaaaacaatgaacaaggacaggaggaagagcagagccgggcactgtggtgcctgcctgtccctaggcgggacgaccgtcagctgtcggggctgagccggtcgggaaggaaacaggatatgaggaccttcattcatcccttacatttctccccgtgtcctgccttcttctctgcagatattgtgggtccttgtaggtgacaaggggcccattgtctgaggagggagacagggacatgagcctgccacggtttcatctggctagctgcaaggacagtgcagggcaggccctgtgtgaaatgggggcagccacatctgggtctggggacaagctgcctgctgcctagtgacacgaacctgtgcccgtggtgcctccgtccccacacgtgagcttccccactccctccttctgagcttgctgcctgccggtgagtgtccctggtctcaggaaagtaacccacaggcaaatggttgctgcattttcccaaaagcaagtattgaacccctaacaataatctcagccctccaggaccccctgctctgtgccacaaggtgtgctgtcccccagccccaccctccaggtgggggcaccgcagactcaggcctggaggctgcacctgtgggccctgcccggggcccaccccacctgggagtctgtatgaggcctctgcccagggtgccagtcttctgaggagcagcggtggctgtgcatgtggaccaaggaaggagggcaagagtgtgtgaatgagggctgagctccgcagcctcagaaagggacactaaggatcccgcctcccctggacacccccagctgggcagggaggttgacaaggaggctggcctggtacagggccttgcccttcgcaccttgtcattttggtgcaaattcaaaaaacttctcatgagaatcttctgcatatgtttaaaaaaagttttctttttaaaaatggcagtaaaatacacataacctaaaacatagcactttcatcttttttcttttttttttttttggggggggatggagtctcactctgtctcccaggctggagtgcaatggagccatctcggttcactgcaacctccatctcccaggttcaagcgattctcctgcttcagcctcccaagtagctgggattacaggcgcccaccaccaagcccagctaatttcttgtatttttagtagagagggggttttaccatattggtcaggctggtcttgaactcctgacctcaggtgatccatctgccttggcctcccaaagtgctggaattacaggcgtgagccaccgtgcccagcctccttcatcgtttttaagtgatcagtacagtgccctcagcacattcatattgctgtgcaaccatcactgccatccatctccagagcgtcttcaccttcccaatctgaaactctgtccctgttaaaccctctccattccctcccctggccctggcagccaccattctggtttctgtctctgtgaatttgactcctctaggacctaacgtaggtggaatcacacaggatttgtccctttgtgactagcttatttcacttagcataatgtcctcagggtccacccctgttgtggcatgggtcagaatttccttccggtttatttatttacttatgagatggagtctcactctgtcaccaggctggagtgcagtggcgcgatctcagctcactgctacctctgccttccaggttcaagctattctcctgcctcagcctcccaagtagctgagactacaggcatgcaccaccatgcccagctaatttttgtatttttagtagagacagggtttcatcatgttgaccaggctggtctcaatctcttgacctcgtgatccgcccgcctcggcctcccaagatgctgggattacaggcatgagccactgcgcccggcctccttctgtttaaggctgaacatgattctgttctatggagaggccaccttttctttatccaggtttctagggatggacacttgaggggcttccaccctttggctgttgtagggaatgctgctatgtatgtgggtgtacaagtacctgtttaagaccctgctttcaaaccttttgggagaaacattcttgactagatggactcacatgggaaactggtgttggtttaaatgtggctgccctaagaaaagctgccgcatccttgggagaggtagataccccccgcccaccagcccccgattccaggctgtccagcctcttctcccagtccacagtcacagcgtcatgccagggctatgggtcatgaagactcatacagtcttaaacagtagaagtaacttgttaaggtggcggtgtgagccatatttgtgagtgtctgctcatggcatgactacaaacggggaggtgctgcgttgatctgcctcctcttctccctgctcagcttgccctcacttcctgccctctccgaggcccctctgacccccatcccaattcaggagcatgtagcacctcactgagttctcagcagagatgatggagacccctcctccatccactcccacagcagacagggcatttcccaggctgagaccccaaggtaattactctgggcttccaggcaccgctaggtcacaaggtggctttaatttttgttttcttttcttttttctttttttcttttttttttttttgacacggagtctcactctgtggcccaggctggagtgcagtggtgtgatctcctcactgcaacctccgcctcatgggtacaagcaattctcctgtctcagcctccagaatagctgggactacagatgcaagccatcacgcctggctaatttttgtatttttagtagagatggggtttcaccatattcatcaggctggtctcgaactcctgacctcaggtggaggtctgccaaagtgccttagcctcccaaagtgctgggattgcaggtgtaagccactgcgcccagcctggtggctttaattgactgccattgggcattacatctgggcatggccagggtgccctgggccttgctcactgtgggtggcctcagtgggtttgggacctcaaggcaccaaagttaagccagtgagaagccatatggggaccagcggatataggcagttcacatggtttattgtatcacctagaggcacttacagtattgcctggattctctatcacagggtaacccacaagggagatcttgtcgtcatcatccctcatgattctgggccacccgggtgcagcgggcggctcttgcccacagggctgggacccattgcataaggcttcccccaaaggcttcaggcctggctgccacctgctgtcggcggggatgcccccgcatgcctctctgagtggctaagcctccctcacagtgaggtgctggcttccaagtgtgagagcccagagctgtcttccctcctgacctggcctcccacatgctgccctctctagttacagcgagtctcttaggggctctgtatttaggggagggatgtcagagtccgcttttagattgaagtggcatcaaagaatatacgggcagtttaaaaaccaccactaacgcgtttgttgctccccctacataacatgccattgttatggagcctcctgtgtgccgggggccactgggccactccagcgacaggacaagggaggtccctgcctactaggttccaggcagcacagtggacaggtgccgtggtgggtttctttcagatggggggggactcccgcacggcctcccgggaagggacatctggtggcagatagagctgggtggtaggcagactggtggcccatctgtgggaccagccctgcctatctgggggaccgctgcactgtggagggacacggggcgggggccagagcacttcatccccctgctcactggctgctgtgatggagacacatgaacagttctaggacaccctggattctggggcattctaaatttcttcaggtttgtggatttcctcgtgctacaaggtggcagccctgagtgtctgggacctgttccctggctgagtccacagtgggcacggctcatctgggtcagcagctccagccttgctcacctcaggcggctcagggcttcttaaagggaaagctgaggtggctgcatacagagaactgacctcggcttcctcaatgcccctgtggaaacataggcatagccctgggcggaccagagtgacccaagcccgggggcttccagcacctgtgtcccagggccagcctctctgagcctcggcgtcctcatatgaaggacagaaacgtcccctgcgaatgtgagaaagggctcagcactgaccctgcgcatgggtgtgcatgggtgtacttgccttatatgtgtgtatgcattgtcaacctaaaataatcaagagaatcagaatatagtctaaagagagtttattcaagcacaaggttgaggactgcagccagggagacacttccaagttgcctcaaggaatgtctggagaacaaaagagaggctcaagtgtttaaagaaaagaaaggatgaatcaggagagggggtggtgaccattgttcatcaggaactctcattggttcacagaaataacactggctagtgattggccagccactgttgaactacagggaatgtggcattttagggctacttggcatctgttagtctcaagcctgcatagcaagtggtttcaggagggacctattttgctcgatggggagtgacacatgactgtgttgcattccagtgcctctcaatgcctgattatataaaggggctggcattcctcagacacaggcctttttatttttcagcatacgtgtgcacacatgtgtatgtatgtgcacatgtgcgtttgtttatgcatgtgtgcatgcacctgtgccttgaaggccaggcagtggccacaccagcccaggagggttgctgctggcaaaagcctttggccgcagaggggctctgcccggctacacttcccaaagtagctcatccctctcctgcccctctatccagctctctttgttttctgttctcattaccttttttattttaaaacaacgcatactctgtaaaaagtccttgcaacagaatagaaggaagtgaagtgacaattaggggctcctcaacccaggttgcccccaccaagggcaccctaaaaacctcacttttaatttgattgcctttgtaaagaccctgtctccaaacatgccttcattttgaggtactgggggctaggacttcagtgtgtgaattggggggtaccgacaggatccataacacaggtgtttgcaatacagagttgcaaacgcaaagctggaggtgagtgtccttcatttgttttggttcatctgctcttggacaaaagcccttccaagatgggagtgatttgagggcctccgatgagcacagtgcatccctctcctctggacaggatgtctggggacccgggctgcttgggcctcctaggctgcaaccacacacctcctcacctctcctcatgatccatcatgatccatcctcccttctgtggtaaggaaaatgatgcttaggaatgtctgaaactcacgaagtttgtacagttcaaaggcgataagggtgggatttttcttttcttttcttttcttttcttttttttttttttttttttttttttgagacagaatctggctctttcccctaggctggagtgcagtggtgatatctctgctcactgcaacctccgcctccagggttcaagcatttctcctgcctcagcctttcgagtagctgggattacaggagcccaccaccacacctggctagggtgggatttttcttgatcagccctgtgaggtatacttggcgtaccattgatgcataatgtttaaagtgtacagttggataaactttgacatggggtgtgctcatgaaattatcaccacaatcaaggtaatgaatatgtgtgcaacatcccacaaagctcttgtgctcctttgtaagcactccccacctccccagccccctccacccatccacccccctcccccacaccaaccccacagcccctcccattccttccaggcacccagctgatctgcttcctagcaccataggctactttgcacttcctagaattctgtagtgagaaaacacagtaggtcttctgtggctccttttgttcagcataattatttctagattcatctgtattctattccctttttaaaaatggtctgaaagatctggctggatgtggtagctcatgcctgtaatcccagcactttgggaggctgaggtgggaggatcacttgaggtcaggagttcgagaccagtctggccaacatggtgaaaacccatctctactaaaaaaaatacaaaaattagccaggcgtggtggtgggtgcctgtaatcccagctactcaggaggctgaggtgggagaatcacttgaacgcaggaggcggaggttgcagtgaacctagattgtggccactgaactccagcctgtgtgacagagcgagactccatctcaaaaaaaaaaaaaaaaaaaggtctgaaagatcattagatgtaggtatagaattagcatcattattttcctgaaatgtttgtagaattcaccagtgaagatctctgtgcctgaagttctccatgtgggaaaagttttaactacaaggatttcttgtgcttgttttacattgagcttcttagatgtgtagatttatagtttccatcaaatctagaaaacttgtcattatttcctcaaatttttttttgtccacccctttttgagactctgatcacacatgtattacactacttgaagttttcccacatttcactgttgctcagtttctctgtgtgtgtgtgtgtgtttcattttgggtagtttctgttcctgtctcttcaaattcactagtttttcttctgcaatgtctaattggttgttaattccttccagtgtgtttttggtctcacacttcgtagttttcatctctggaagtttaatgtgggccttcttacattctccacgtctctactggattttagaacataggatgacacagacatgatagtagtttttaatgtccctttttgctaattccaacatctgtgttagttatgggtcagtttatattgaattttttctcttcattagttatagtcccttttatgcctggtaatttttttttttttttttttttttgagacagagttttgctctgtcgcccaggctggagtgcagttgtgcaatttcagctcaccacaacatccgcctcctgagttcaagcagttctcctgcctcagcctcctgagcagctgggattacaggcacgcaccaccatgcctggctaatttttgtatttttagtagagatagggtttctccatgttggccaggctggtctcgaactcctgccctcaagtgatccatctgccttggcctcctaaagtgctgggattacaggcgtgagccactgtgcccggcctctgcctggtgatttttgattggatgccagactatgggaattttaccttgccatgcactagatatttttgtagttctataaatattttttagctttgttcaaggatgcagttgggtaaacatatggacttcttcctgttaagttttgttaatatttgctaggtgggaccagagcagtgatcactgcagggctaattatccatcattcctgaagcaagaccctctgagtattcaacgcaatgccccgtgacctgtggggcttttagggctggctggtgggcataggcgtgtccctgccctgtgaaagctccctgtggtcctcacaggtggttctttctctggcctcatgtgctctccccaccgcacacatgctgaacggtcctcgaggagcccctctgagatctctgggttctctctctctctgcagctctctcatcttcagggctccatgctgtggactctggccaccttagtcttctgggcctcccagttttgtcttctcaacttagagagtccactgggccccacagggcttcccttccctgatccatggcccagaaatggtctccgggcagtgagctggggcaataggagggctcacctcattcattcccgtctctcagggaccacagtgttttaccgcttggtgtagagccttgcaaacttgtttcgtaggttttgtccatttttgttgttgttccaggtgagagtaaatctggtttctattactccatcctgaccagaagcataattcccccgagatggggttgaaccaggctctgtcttgccagacagctacctttgaacacaccgaggctgagcacagctcacattccatctggtgtatttttattgctctgccatgtttgacctctggaaacctgagtttatctcttgtgctatgagaagaatgcagcaaaacatgtattttctgtttagaaatcttaatattgccccccattgaactcgttaggaatgcggcagtagccaatcataaatgcccacctgagcgattctggagtcatttaaagaaacgtccactcaaaaggggttttgccccaagacagtgagcactcaggagactgtgtgtggtgggggtgctccaccatagagctggtcggcatccacagccaccaggacgctgccagagcccaggcctgcgccacgccctgcccagaggcacacctgcctgctcaaggcaaccagggcaggctcaaggcagccagggccagctcactgtgtgcctgtcactgtgtgaagcctgcttcttctttatttcgcttagcaagtgaggcaggagcatgtaaagctgctggcagaggaatatctaattgtgagtgtgagtgcgtgtgtgactgtgagtgtgagccagcccgtcagtgtgaatgtttgagagagcctctctgtatgtgcctgggggagggtgtgaggtgtgggctagggaggggcctggcgatgcccaccggctcacctcacactggacagtgcctgcatgttcaagatgacccttcccctgggccgcaggatgctgcatggcaagggacaagctcagccctggccccagagtttccagccgagcaagacactgcccaccctacagtgcatggctgctggtgcaggccccacccttttggaggcattgtgtgccagcctgggggctgaggatatgactgtgcagatggccatgccccaatcctggagtccaccatgctgggtggtggcatggagcttccctcctccgcacccccgcagagccggggcctctggctgctccaaatgccagttggagaaggtggttttctttctctactaatgtcttttcagtacctcctaaatggctctactttgaacctgctgggcaaggaagagattttcaaggaaaccatctaccgtgtgcaagctcctgccggccaaccccagaccccagcacggagccaggcgcctgtgcccgccaaccctcagcatcctcctcagaaaggctggtggcatcaggtatggggataagtgaccgccacttgcagcccctaggctcctcggcagctgcgtcttgggttcaagaggatgattttgagggatgacagtctccctctaggcccgtctcacctttgctcctcctcagaggcgcccggtgaattttctgtgcacttataattgacacttgaatttggtccatgagaggcgtggtgggccagtgtgaggtggctccagtgcacaggagggaggaggagttttggggcaaagaccttggtccacatcctctggcaagacgcacctcctgccccagccctcccctgagggagatagtagagacagctgggaccctggacccctgggggctgttttctgacctgtccagcaggcagtggtgaggaggaggaggaggaggacaccggcctcatgtcctgggagtatcagaggattgaaaaagcaccacggatgcgctataaacagaagccactgtgttccttttggttatggtcactaccttgagcatctattttgaatttattgaacagcagatagcttcacaccacagggttaattttttttatgcggaacaaacaattttaaaacaaaacattttccattttctgttctttaaaagcctgtctgtacaagacccagctgaagctgaccagggcattcacacttcacacacaacccccagcccacctgctccaggctttgggtggggggcggagggtactgcctgggagctgcatttgggggttgcacctgagggtgctggtccatgcctggctagcactgactctggcttgtttctcccctacaggaagcccctggccagcctccacctgagcccagtgagctcagctttaaggatggagtcaggcagggggtcctcaacccctccaggacccattgctgccctagggatgccagacactgggcctggcagttcctccctagggaagcttcaggcgctccctgttgggcccagagcccactgtggggaccctgtcagcctggctgcagcaggggacggctctccagacataggccccacgggagagctgagtggtagcttaaagatccccaaccgggacagcgggatcgacagtccatcctccagtgtggctggagagaactttccctgcgaggagggcttggaggctggcccaagccccactgtactgggggcgcacgcagagatggccctggacagccaggtcccgaaggtcaccccccaggaggaggcggacagcgacgtgggtgaggaacctgactctgagaacaccccccagaaggctgacaaggatgccggcctggcccaggtaggcttccccttctctgtccccgctgcgggctgcaggcctttccttaggaggggtttgagattttcagtgggcgtcatcccacaccttgtttccaggaatgtggcacacaggctcgtgctgtgtgcaaggggaggtcctgggatgcagtctgccctagaaaagcctgagggaaaaatccatgcaggccaggccaagcccacctgacaccttgagcagtgacctcagtcctgagtctcagtttccacaactgcacagtgggcacctcccgaccctgggaaggtatgatggtcagtcctactggtggtgctgccaaagctgccctttgcacagtgctcactgctgactttatgaaactcctgggaggagacgatgtgagtggggaaactgttttcctcaatgggaaactgaggcacagagggcatggtacctggccagcgtcacctatggggtgtggcacaggctgggtgccctgtgctcttcaggacatggtggggcaggacctgtgaggcccgcagtgcagtgtggagaccagagcagacagttcccacaacacgatggggctgcatggagggagtttgtttgcgttctcattagcgtttatggggctcttggctcggtgctgggatcttggggagatggagaggcagcagatggcctcaggctcagagaaactgtgggtatggggggcacagcttgggtaagttgccaagtgaccaggtcctgggagcgctttgcgggtcaggcttgctggctcctaggtggggacgttgctggctgacacggggaccatcgggagacgggctgggcaggtgaagggcagtccggtgcctggaccactgtgagctggcttggcggagacgaggccagggctgtgttcaatggaggctttattatcactcaggtgtaggaaggatcagaccactgccattgacaagatggtttgtcatcctcagtttccaagagaaaggggcatgtcacaccacaccgtgaggccacagggaagcccagggtcagtcagaaggcagagggttcgagggggaactgtgggcctgagacggtaatgtggtttctgcgggaaacttgagttcccagccatgatgggaatgggaggtcagacacacctgattctactccctcacttttgtagtttacacacaactgaccagcattaatcttaaaatagagatcagaagactgacagaatagactctgtggcaataagataccaaattataaacaggaccaggcaagtgtacacaccatacacttaaagaataaactatattctggctgggcgcggtggctcacgcctataatcctagcactttgggaggccgaggtgggtggatcacctgaggtcgggagtttgagaccagcctgaccaacacggagaaaacctgtctctactaaaaatacaaaattagctgggtgtggtggcacatgcctgtaatcccagctaattgggaggctgaggcaggagaatcacttgaacccaggaggcggaggttgcggtgagccgatatcacaccattgcactccagcctgggcagcaagaaagaaactccatctcaaaaaaaaaaaaaaaaagaataaactatattctaatagccacattctttttctttagcagctaaacaagcaataagcaatattaaaacaactatagctccaccagatgctgactgacactcccaccgcccacccccccaccccacccccattccaccagccataactgcagctttgattggacaagagactgattaactttctttcaatgagaagatcactgactctgtatggactggctctggccagtttgcagaggctgcacacttgcgtgcatttgtgtcctgaaaagaccttttggcatacagagcctgactgtaatacatttaaatgttaaggctccaccccaaggtgaacatgaattgcatgttacacgcaccctcccctcccctcccccctcttccttcccctcccctcccttcccccattcgccttcctccacccccctcccctcccctcccccatcccccctccactcctctctgcccctcccctcccctcccctcccctcccctctccttcccttccctttccttgagacagaatctcattatattgcccaggctcatctcaaacttctggcctcaagtgatcctcctgccttggcttcccaagttgtcaggattatagctgtgagccaccatgccaagcaccaactgatttttttgtgttcattttgtattctgtaaccttactgaactggttcgttagtcctaacagtttttaatggaatcttaaggattttttagtataaaatcatgtcatctgtgaacagaactaattttactttttcctttccaatttggatgacttttcttcctttttctctcctaattgctctggctaggacttcccatactatattgaatagaagtggtgagagtgggcatccttgtcttatttctaatcttagaggaaaagttttagtctttcaccattgaatatgatgttagctgtgggcttctcatatatgagctttattatattgaggtagtttcattctgttcctagtttgttgagtgttttttatcatgaaaggatgttgaatcctttcaaatgctttttctgcatcaattgagatgatcatgtggcttttgtccctcattctgttaatgtggtgtattacattaattgatttttgttatgttgaaccagagttgcattccaggaataaacttggtcatggtgattaatcctttcaatgtactgttgaatttcatttcctagtattttgttgaggtcttttgcatcaatattcatcagggatattggcccgtagttttattttcctgtatcgtctttatatggccttggtatcaggataatgctggccttattgaatgagctggaagtatgccctcctcttcaattgttttggaagaatttcaggaggattggttttatttctttttaaaatgtttatagaatccatcagtgaagccatctggtcctggacatttgtttgtttggaggatctttattactaattcaatctgcatactcattattgctctttcaaattttctatttcttcatgattcagtcttcccaggttgtgtgtttctaggaatttacccattactgttcatagtattctcttttagtctttttatttctgtggcacctcttgtaatgtcccctctttcattttagttgagtcttctctctctctctttttttttttgaggcagtctatttaaaaatcacaacatttagaaaaaaatctatacatttagacaatagaatagattttttttttttttagatggagtctcactcactctgttgcccaaggtggagtatagtggtgctaactgcaacctccacctcctgggttcaagcaattctcccgccccagcctcccgagtagctgagactacaggcgtgtgccaccacgcccagctaatttttgtatttctagtagagatgaagtttcaccgttttggccagggtgatctcaaattcctggcctcaagtgactcacctgccttggcctcccaagtgctgggattacaggtgtgagtcaccattcccagcctccttttttcttagttaacctagctaaatgtttgtcaatttttttgctcttttcaaaaaaccaacttttcatgttgttggttttcctattgtctttctattctctattgcagatacctaatgtatatagatatctctataggtctgatctttattacttccttcctcctgctagcttcagtttcagtttactcttctcttttgagtttcttgatgtgcagagttaggttgttgattcaagattttttttttttaatgtacgtatttatagctgtaaaattccctcttagcactgcttttactgcattccataagtatgatgatttcatttttttcttttatccattggttgtttaagaatgtgttgtttaggccaggtgcggtggctcactcctgtaattccagcactttgggaggctgaggcaggtggattgcctgagtcaggagtttgagactagcctgaccaacatggtgaaaccctgtctctactaaaaatacaaaaattagccaggcgtggtggtgggcacttgtaatcccagctactcgggaggctgaggcaggagaattgcttgaactggggaagtggaggttgcagtgagcctagatcccgccactgtgctctaggctgggcgacagagcaagactccatctcaaaaaaaaaaaagaaaaaagaaaaaaaatgtgttgtttaatttgcacatgtctgtggattttcattgtgttattgaattctagtttcattccattgtgattgaaaaagatggtttgggccaggcatggtggctcacgcctgtaatcccagcactttgggaggccgaggcagtcggatcatgaggtcaggagatcgagaccatcctggctaacatggtgaaaacctgtctctattaaaaatacaaaaaattagccaggcgtggtggtgggcacctgtagtcccagctactcgggaggctgaggcaagagaatggcatgaacctgggaggcggagcttgcagtgacctgatatcgcgccactgcactccagcctgggtgacagagcgagattccatctccaaaaaaaaaaaaaaaagaaaaaaaagaaagaaaaagtttgtataatttcagtctttgtgtgtttgttgagacttgttttatgcctaatatatggtctatcctggagaatgtttcatgtacacttgagaagaacatatattgtgctgtttttgggcagcgtgttctgtaattgtctgtttggttcaactgtctgtagagttgttcaagttctctatttccttattgatcttctgtctgtttattttattggtttattgaaagtgagatattaaagtctcctaatattattttgccgatctctattttttccttcaattttgccaaagtttccttcatatatttaggagcgctgaggtttggtgcataaatatttataactgttacatctttttggtgacttgacctttttataactatataatgtcattctttgcttcttgtaacagttattttttttccagttggcagcagtgattctttttttttaaagtgacagatactagctgtacatatacctgagttacatagtgatgttttgatacatataatatatagtgattagatcatggcaattaacatagccatcatttgaaacatttatcatttctttgtgttgggaacactcaataccctccttctagctattgaaactatatactatacgattgttaacaatagtccttctacagtgtcatagaacactggaaattactccttttatctatctgcaattttatatcctttaacaaatctctccctatccctctcttcctcctacgcttcctagtctctagtattctctgctgtactttttacttctgtgagatcaactttttttagcttccatgtatgagtaagaatatgtggtgtttaactttctgttcctggcttattttgcttaactaaatgttgtctagttccatccatgttgccacaaatgacaggatttcatatttttatgactcagtagtatgacattgtctatatataccacattttccttattcactcatctgttgttggacacccaggttgattccatatcttggctgctgtgaatagtgctgcaataaacatggaggtgcagctgtcccttcaatatactgagttcccttcctttggataaatgtccagtcgtgtgattgctggatcatatggtagttctatggtttttctttttaaaaagaatgtattcattcatttttttttttttggagacagagtcttgctctgtcacccaggctagagtgcaacggcaagatcactgttcatgcagttcgctcctgttctgcttgatattcatgaacatttcagctctccataagagtcctgaaagtttttcctctattctaatatcacaatctccaacgttatcagaaacctgcatttaggagcacctgttagagtcctatagctgactataaaaaccaccttttggccagggacggtggctcatgcctgtaatcccagcactttgggaggctgaggcaaatggatcacctgaggtcaggagttcaagaccagcctggccaacatggccaaaccctgtctctactaaaaatacaaaaattagctgggcatggtggtgcttgcctataatcccagctacttgggaggctgaggcaggagaattgcttgaacctgggaggcagaggtcacagtgagctgagatcgtaccactgtaccccaacctgagcaacagagtgagactctgtctaaaaaaaaaaaattcaccttttaaaaaggattaaaacaagtcaacaattgtctgtggatgacaaaaagtcttatggtgccacagtcaaagacacaattgaaaaagaaatttgttatctctgtggcacactaatttaacataacaattatcattattggttgggcatggtggctcactcctgtaatcccagcactttgggaggctgaggcgggtggatcatgaggtcaggagatcaagaccatcctgactaatatggtgaaaccccgtctctactaaaaatacaaaaaaaaattagccaggcgaggtggcgggcacctgtagtcccagctactcgggaggctgaggcaggagaacggcgtgcacccgggaggcagagctttcagtgagccgagatcacaccactgcactccagcctgggcaacagagcgagactccatctcaaaaaaaccaaaaaacgaaaaacagttatcattattagtgataacatagtaagttatgtcataattatagaagttttgcataattttggaacatgtaccaataacacatttataaggagcagaataatgctttaataaaactctgttgtgcttttattccaatgttcaatttatggaaaaactgaatactcctttaactctagccaatatggtcacatacagaatttcttttacaagattaatttttacaaaccttccacaacttgctttaacctttatctttatcatatataatttaaaacaatcctttaaccctctaaactaggcaaaaatatccacatttccatgccttcttataatcttttaccaaaagcacattctgctttccctacacatcttgcatgtaaactgtttttccagtagtgtcaagtacacgttacactgttaactcttagcaacttttacttttggtgaaaaacctggtaagtaagcaattctaattatgcactaggtttggagcctaggacatccaacagaaatgcagataagatttgactctttccagcatagatgaggggatacagctagctctgtatgtccccaggccttacctagctgtaaagcaggcaaattgtacagttaagagtcatgattgcagtttataaagcattttacaacttgcactgaccatctacggcatgcttggactttctgacttgacctaaacatccctcttttaaacaaccagttattttactttgggacaagaatttaccatacaaaatccttttcatgcaaaatcacttttctttataaccttccttaccaacaatacctttacctttataacttttgaattagacaaattaattttccttctgttaggaagttatggtttatactacatgttgctgtatgggtcctgtgaagggggagcagacaaagaggttatctacatactgtagaagttatccccccttgagagatgccttggttagatttttgctagggtttgtccaaataagtgtgggctatttctaaatccctgaggttagcctgtccaggttaaagttattggttaaagatttaggtggctttcccaggagaaatagagctcttagagataaaggtgaattcagaggtcaggtaaatattaagcaaacacccatctaggaaagtatatttttgccccaaagaggtgtagggtatttagacactaccagggactggtgggaaagtggtaattggtctcttaaataatgtaaaggggtgtgaatcttttttttcttttttttttttttggagggagggagtgctatttgcccacattacctgactgcatttggagaagaattgctcagaggagattagcacagagtaggcagctcttgaacccaaagggaaatttataattttatttgctgcctccagagtcacccttggctttgtcctgctagtgccaatgtctgatttggaagccagctagagcagagagctctccagctcaaggccatcaggggttgggattctgtcctgggggcccttcagccttcaaagcagtcccgtttccagtggccaagctcttggcagagaggggaaaccatgtgaggtttcctcccgtttgtcccactggggcagtttgccttccagtggcctggcttcccacgccaatggcagttacctggaggagtgtccttagggaaacctggaggaggctggtgggcttgcagagcagccagtagttaagcctgcctctggtccctgcacttctctttttccttagccctgtcctcctgattctactcccagttataaaagactgaggaggtgactttgaggatttcctgcatagaggcactgggttctgaggctgacttttgttatttcttcccagttaattttgaggaaaaacagtattacaaagaaaacctagtttttctatttttgtttgtttgtttatttgtttgttttttgacagagttttgctcttgttgcccaggctggagtgcagtggcacaatcttagctcactgtaacctctgcctcccgagttcaagtgattctcctgcctcagcctcccaagtatctgggattacgggtgtcagccatcattcctggctaattttttgtatttagtagagatggggtttcaccatgttggtcaggctggtctcaaactcctcacctcaggtgatccacccacctcaacctcccaaagtgctaggattacaagcatgaaccaccgcgcctggcccatttttctgttttaaggtttaggggatcaaacttttcccactttttgggaatacatctgaggggtgtgtcctgtggtatggagatgtgattacccatctgtgaagaaagaacagtggagaaaaaaaggaaaaaggtaaaatgtgtcccttcttactttcctattatcttgaatagggcatcccccattcatccttagggttccagaatgaaccggtcttactgtgtacccttaaccttggtcccatttcatcacaattacccacttgacaacagaggaaataccagagtgaacagtgggccccctgctcatccttggggttctggaatgaaccagtcttaccatgtacccttaaccttgccttcatctctgttttaatgataatctatcagcctttatctctgtcctatgggtctcttgtgcctatggacttcagccagcctatatccttatctccatgaccttatagtgacttgctcggagcattctgagcaacaaaatgatgatctcttttctcagagtcccatctctcatgttctttaagtagatgagaagcctgtttttcagctaactgccacaagggggctgactcccctgcctttgaatatgaccttgaaggtcttgatgcatgttgagaggggtgtggaagtgattagagaaatggaggctacaggaggaagtgggaggaggtgagaggaatattcatggaaagcctttatatgcttacaaaaatagcagcccttccatttgagagggcaatgtttattttccctcttgacataaaagaagaacctctggaggacttggggcttggggtaagaacttgcaatggcaaaggaagaatgttcccttatcccaaaaaggtactaactcaaaaaagcaagtaggcagggtccttaaaggaccacagagtgaggccctgtgcccgcagacaaactgcttcaaaagccactggaaaacttggccctggggcataacaggaatgaaaagcacatggtaagtcagaaggagctggcagagccagggttccaattagtgtctgtcctggccatgtgccagtagtcaggggaagggttagaggtcatccgagctggtagggtaaaaacaagtataaatctcatggcgtatccccaagggagcctgtgtctttgctgccacacaaattcagcaagagccatgagtgcatgaataacagggagtgtgtgtttaagaagtcaagtgacatacaaagtgaaaacaaagaggcagacttgcctccgaggtagacagtccagtgagtgcacaagccatttcagaatacacacagagaaaacaggagaataggcagtatgggtttttggaaaacaaccaattttagttgaaaaagcagaggaggctgtgtgcagtggctcacgcctgtaatgccagcactttgggaggctgaggtgggcagatcatgaggtcaggagatcgagaccatcctggctaacacggtaaaaccccatctctactaaaaatacaaaaaaatagctaagtgtggtggtgggtgcctgtaatcccagctactttggaggctgaggcagaagaatggtgtgaacccaggaggcggagcttgcagagagccgagatagtgccactgcactccagcctggacgacagagcgagactctgtctcaaaaaaaaaaaaagaaagaaagaaaaaaaagaaaaagcagaggaaacaacagacattgcatggtgttaggttttagccctaccactctcatgagcctcctgtctaggagggccatgggtgcctcagttctactcagtgcagactccaaggtccctcctctctgacttgagagattcatgtgctccgtttaacctttgacttggggtattctgcactggcatgcttccagggagttacatcccttcgcccctgattctttcgtgtggtgggctgtctgcatgcccagtggcccaccagcacttgggaggggccgtatgtgtagtgtgtttactggagttgtgagcatgctcacttgagccattcttcctgtacctgtcaagtgttcctagacggtcatataccaattacacttcaccatttcgccccttagcgcgcatgcatgagtccatttatccaactcttgagatcttatcaggaagctgattatctgtttcaggtttttctatctattgggagactgcatttccctggtgctggctgcaaccagttattattttaaagaggctgtttagcaaccacctgaccaatgcaggattttttgctccttagttcagctaaaatccgggttcttgtctcattaccaggaaaaattaggcacaaggacacattgaagggtgaggagggcggatttattagacaaaaagaaagctctcagcaaagaaagaggggtcctgccaacaggctcccacctcacagattgaataccaggccaccacacactagttgaagaggccaggcttctcccctgcataaggctccaccctgcataaggctccaagctaccaccattcctggtagctccaccccatttccccagtacctgtgggcctccagtccattgtgggcatgcccaggcaagaccctgcacaggttcccttacctacacaaaaacatctggcataaatgcttgtggggcaggctggagattctccagggaccctttcttatctgcctcctgcatctatcaagaccatcacctgatgatggtcacctgatattcctggtgtggcggggcccctgctcccctgctcatgtctgcctggctacctaccttacactaatctgccatgttgacttctgattaatcatagttccaggaatgcctctaagatttctatcttattactgttccttatataagagcaagtacttactgtaaatcttaatcttaggtcatgacaaccttgatgttaccataaacacatatttaccataaaacctgcccttaggctatgataaatacaacattcttgcctttccctgaggggttgatttcaatgtcctacacactccttctgaagcactgtataccctttccctatggcatgtaagtcctgggtttgggggttgacagcatgaagatctacctgttttgtggccacccaagaccatgctcttgtctgtaagttccccaataaatcaccctctgctgagaaactacattagtctgccttgttctttggttcctcaactccttcagcatttaggggtctctgcaagcacagccctttcatgaaacattatcctcttcaatttctttcatcagtgtttttttgttttgttttgttttgtttttgagatggagtcttgctctgtcacccaggctggagtgcaatggcgcagtctaggctcactgcaacctctgcctcccaggttcaagtgattctcctgcctcagcctcctgagtagctgggactacagatgcgtgccaccacacctggataatttttgtgtttttagtagagacggggtttcaccatgttagccaggatggtcttgatctcctgacctcgagatccacccgcctcagcctcccaaagtgctgggattacaggcgtgatccaccgcgcctggccaacccctgacctcttcatccgcccaccttggcctcccaaagtgatggaattacaggcgtgagccaccgcacctggcctcatcagtgttttttagttttcttttgtaaaccaaaaagtatctgatactggtttcaatcaatttagaagtttattttgccaaggttgaggtcatgcttggaagaaataaacatggaatcatagaaaaacagtctgtggcctgtgcctttctccaaagaggactttgaagtcttcagtatttaaaggggaaaagtgggctggaggggagaaagggaaggtatgttaatccacatgttgcaagagaaaaggagccggtaggcgaatagtcaattatgtattcatctggttctcagtaaatcggcactttacataagatgaggtaaacatagggcagccacctgtggagatatttaacctttcatctatagctgtctgcttaggaacaaaaggaaaggcagtttcttgcatgactcagctttcagcttaatttttttcttttggcattatgaattggggtcctgtgttttttttttcctttcacaccttgtagaggtttttttttttttttttacctttttcattaaatgtattcctaggtatttattttgcagttattgtatatgagattgccttcttgatttctttttcagctagtttgttgtttgtgtatagaaacactactgttgttcgtatattgattttgtgcccttcaactttatgaaatttttttttatcagttctaagagttttgtgatacaatataggttttctatatataagatcacatcagctaggtttagtggctcacacctgtaatcccagaactttgggaggctgaggtgggaggactgcttgagccaaggaattcaagaccagcttgagcaacatagtgagaccttgtctatacaaaaaaattaaaaagttagctgggtatggtggtgcgggcaacaagtgagatcctgtatcaaaaaaacaaaaaagattatataatctgcaaacagggacaatttgacttcctctattcccatttggatgccttttatttctttctcttgcctaactcttctggctaaaacttccagtactatgttgaataatagtggggaaagtgggcatccttgtcttgttccaattcttagaggagaagctttcagcttttctgcattcagtaagatgttagctgtgggtttctcacatatgggctttattattttgaggtatattccttctatacctagtttgttgagggcgtttataataaagggatgctgaattttatcaaatgctgtctcagcatatattaaaatgatcatatggtttttgttcttagttctgtgaatgtgatgtatcacatttattgatttgtgtatatggaacaatccttgcatcctgggataaatcccactcgattgtggtttgttatctttttcatgtgctgttggatttggtttgcgggtattttgttgaggattttttcatctatgttcatcagggatattggcctgtagttttcttttttgttgtgtcttttcctggttttggtatcaaggttatgatgaccttgtaaaatgagttaggaagaatttcctccgattcaattttttggaatagtttgataattggtatcaattgttctttataggttcagtagaattcagtggtgaacccactgggtcctggactttttttgtttggagatttgtttgtttgtttgtttgtttgtttgtttttgagagagtctcaccctgtcacccaggctggagtgcagtggcgcaatcttggctccctgcaacctctgcctccctagctcaagctattctcttgcctcagcctcctgaggagctgggattacagtcacccaccaccacacccagctaatttttatatttttttgtagagatgggtttcaccatgtttcccaggctggtttcaaactcctaggctcaagcagtatgccagccttggcctcacaaagtgctgggattacaggtgtgagccattgcacccggcccttaaatttcattcttaatttcttccttcatccattcatcattcaggagcatgttatttaatttccatatattgatatagctttgaatgtttctcttgttgttgatgtctagttttattccattgtggtaagataagatacctaatataattttgatttaaaaaaaattctgaggcttgttttgtgtcctaacatattgtcagtcctggagaatattccatgggtacatgagaagaatgtgtattctgcagccgttgggtgaaatgttctgtaaatgtctgttaggtccatttgttctatggtgtagtttaaatctgatgtgtctttgattttctgtctagatgatctatctaatactgagagtggggtgttgaagtctccaaccactattgtattggaggtctatctttccctttatatttaataatatttgctttctatatctaggtgctctagtatttggtgcatatatatttgcaattatattctcctcctgaattaatccctttattattatgtaatgtctttctttgtttctttttatagtttttgacttgaagtcttcttcgtctgatataagtatagctactcctccttgttttgggtttctgtttacatggactatcttttttcatccttaactttcagtttatgtgtgtctttacaggtaaggggagtttcttgtggacagcatatagttgggtcttggtttgttaatccattcagctagtttatcttttaaacaggggaatttaatctatttacattcaagattattattgattggtgagaacttactcctatcattttattgattgtgttctggttgttttgtatatcctttgttacttcttctcattatttatttttgtagttgggtggttttctgcagtgataaggtttgattcatttcttttatcatttgtgtatcagctttaccagtgagttttatagttttacatgttttcaagatggtgtttattgtcttttcacttccagatataagactgtcttgagcatttcttataagactggtctagtggtgatgaattcccttagattttgcttgttggttaaagattttattcctcattcctttctgaagaatagctgggaggattgcttgagctcctgggttggagtggcagactgttcttttagctgaaagtgtggcagtgagggttggtttccctgctgtgcaggaacagaatcacagctgatcctgggcccaagctctatgcatctggggttgtggcattcaagcactcatgtggtcttggtggaatgcagacggagcccagtgctagagaggtacagtagctactgcctggagcattctggaggttgctctggtctcaggatggtgccatgccacagcagcctcgttcacagtgggtggttggggggtggggtgtgtacactttgtgatcctaatccgggtgatgtagctatgcaaattctcacaactctccaaactgggcttggggcttgcgaggactgtgggattctcttgtgttatactttttccctgaaaagggaagtccctcctgactctggatagatgctatctggttggagggagatgggaccactagaggctgggtgcctccacactgctctctcaatcatcacaggtgcatctctactccaccactcactccaccgccagccaaatcttagttgtttgtgccttagtcttttcttgggatgaggggaggaatgccaggtgtttctagtcagccatcttactgatatcactctccttcttttttttggtacaaggtctcactatgttgcccaggatagcctcaaactcctgggcttaagtgacctacctcaacctcctgagtaggggggactgtaggtgtacaccattgcatccagccttgtaacagtttttgctataaagtctattttatctaactatggccactcctgctgtcttctggttaccatttgaatgaagtatctttttccatcctgtcactttcagcctatgtgtgtccttatatctaaagtgagtctcttctcaacagcatatagttggatgctgttatttttaatccattcagccaatatgtctttttcttttttattattattatacttcaagttctaaggtacatgtgcacaatgtgcaggtttgttacatatgtatacatgtgccatgttggtgtgctgcacccgttaactcatcatttacattaggtaaatctcctaatgctatccctcctccctccccttaccccatgacaggccctagtttgtgatattcctcactctgtgtccaagtgttctcattgttcaattcccatctatgagtgagaacatgcggtgtttggttttccgtccttgcgatagtttgctcagaatgatggtttccagcttcatccatgtccctacaaaggacatgaactcatcattttttatggctgcatagtattccatggtgtatatgtgccacattttcttaatccagtctattattgatggacatttgggttggttccaagtctttgctattgtgaatagtgctgcaataaacatacatgtgcatgtgtctttatagcagcgtgatttataatcctttgggtatatgcccagtaatgggatggctgggtcaaataatatttctagttctagatccttgaggaatcgccacactgtcttccacaatggttgaactagtttacagtcccaccaacagtgtaaaagcgttcctatttctccacatcctctccagcacctgttctttcctgactttttaatgattgccattctaactggtgttagatggtatctcacggtggttttgatttgcatttctctgatggccagtgatgatgagcattttttcatgtgtatgttggctgcatgaatgtcttcttttgagaagtgtctgttcatatcctttgcccactttttgatggggttgtttgatttttttcttgtaaatttgtttaagttcattgtagattctggatattagccctttgtcagatgggtagattgcaaaaattttctcccattctgtaggttgcctgttcactctgatggtagtttcttttgctgtgcagaagctctttagtttaattagatcccatttgtcaattttggcttttgttgccattgcaattgcttttggtgttttagtcatgaagtccttgcccatgcttatggcctgaatggtattgcctagcttttcttccagggtttttatggttttaggtctaacgtttaagtctttaatccatcttgaattaatttttgtataagatgtaaggaaggggtccagtttcagctttctacatatggctagccagttttcccagtaccatttattaaatagggaatcctttccccattgcttgttttagtcaggtgtgtcaaagatcagattgttgtagatgtgtggtattatttccgggggctctattctgttccattggtctatatctctgttttggtaccagtaccatgctgttttggttactgtagccttgtaatatagtttgaagtcgggtagcatgatgcctccagctttgttcttttggcttaggattgtcttggcaatgcgggctcttttttggttccatatgaactttaaagtagttttttccaattctgtgaagaaagtcattggtagcttgatggggatggcattgaatctataaattaccttggtcagtatggccattttcacaatattgattcttcctatccatgaacatggaatgttcttccatttgtttgtgtcctcttttatttcgttgagcagtggtttgtagttctccttgaagaggtccttcacatcccttgtaagttggattcctaggtattttattccctttgaagcaattgtgaatgggagttcactcatgatttggctctctgtttgtctgttattggtgtaaaggaatgcttgtgatttttgcaaattgatttcgtatcctgagactttggtgaagttgcttatcagcttaaggagattttgggctgagatgatggggttttctaaatatacaatcatgtcatctgcaaacagggacaatttgacttcctcttttcctaattgaatatgctttatttctttctcttgcctgattgccctggccagaacttccaacactacgttgaataggagtggtgagagagggcatccctgttttatgccagttttcaaagggaatgcttccagtttttgctcattcagtatgatattggctgtgggtttgtcataaatagctcttattattttgagatatgtcccatcaatatctagtttatcaagagtttttagcatgaaaggctgttgaattttgttgaaggccttttctgcatctattgagataatcatgtggtttttgtctttggttctgtttatatgatggattacatttattgatttgtgtatgttgaaccagccttgcatcccagggatgaggccaacttgatggtgatggataagccttttgatgtgctgctggattcagtttgccagtattttattgaggattttggtatcgatgttcatcagggatattggtctaaaattctctttttttttgttgtgtctctgccaggctttggtatcaggatgttgttggcctcataaaatgaaatagggaagataacctctttttctattgattggaatagtttcagaaggaatggtaccagctcctctttgtacctctggtagaattcggctgtgaatccttctggtcctggactttttttggttggtaggctattaattattgcctcaatttcagaacctgttattggtctattcagggattcaacttcttcctggtttggtcttgggagggtgttatgtgtccaggaatttatccatttcttctagattttctagtttatttgcataaaggtgtttatagtatttgctgatggtagtttgtatttctgtgggatcggtggtgatatcctctttatcattttttattgctatttgatttttctctcttttcttctttattagtcttgctaatggtctatccattttgttgatcttttcaaaaaaccagctcctggattcattgatttttttgaagggttttttgtgtctctgtctccttcagttctgctctgatcttagttatttcttgccttctgctagcttttgaatgtgtttgctcttgcttctctagttcttttaattgtgatgttagggtgtccattttagatctttcctgctttctcttgtgagcatttagtgctataaatttcgctctacaccctgctttaaatgtgtcccagagattctggtatgttgtgtctttgttctcattggtttcaaagaacatctttatttcttccttcatttcgttatgtacccagtagtcattcaggagcaggttgttcagtttccatgtagttgagcggttttgagtgagtttcttaatcctgagttctagtttgattgcactgtggtctgagagacagtttgttatagtttttgttcttttacctttgctgaagagtgctttacttccaactatgtggtccattttggaataagtgtgatgtggtgctgagaagaatttatattctgttgatctggggtgtagagttctgtagatgtctattaggtccacttggtgcagagctgagttcaattcctggatatccttgttaactttgtcttgttgatctgtctaatgttgacagtggggtgttaaagtctcccattatttttgtgtgggagtctaagtctctttgtaggtctctaaggacttgctttatgaatatgggtgctcctgtattgggtgcatatatatttaggatagttagctcttcttgttgaattggtccctttaccattatgcaatggccttctttgtctcttttgatctttgttggtttaaagactgttttatcagagactaggattgcaacccctgcttttttgttttccatttgcttgatagatcttcctccatccctttattttgagcctatgtgtgtctctgcacgtgagacgggtctcttgaatacagcacattgatgggtcttgactctttatccaatttgccagtctgtgtcttttaattggagcatttagcccatttacatttaagtttaatattcttatgtgtgaatttgatcctgtcattatgatgttagctggttattttgctcgttagttgatgcagtttcttcctagcattgatggtctttataatttggcacgtttttgcagtggctggtaccggttgttcctttccatatttagtgcttccttcaggacctcttgtaaggcaggcctggtggtaacaaaacctctcagcatttgtttgtctgtaaaggattttatttctccttcacttgtgaagcttagtttggctggatatgaaattctgggttgaaaatactttaagaatgttgaatattggcccccactctcttctggcttgtagagtttctgccgagagatccactgttagtctgatgggcttccctttgtggataacccaacctttctctctggctgcccttaacattttttccttcatttcaactttggtgaatctgacaattatgtgtcttggagttgctcttctcaaggagtatctttgtggcattctctgtatttcctgaatttgaatgttggcctgcctcactaggttggcgaagttctcctggataatatcctgcagagtgttttccaacttggttccattctccccgtcactttcaggtacaccaatcagacagaggtttggtcttttcacatagtctcatatttcttggaggctttgtttgtttctttttactcttttttctctaaacttctcttctcacttcatttcattcatttgatcttcaatcactgataccctttcttccacttgatcaaatcagctactgaagcttgtgcatgcgtcacgtagttctcctgccatggttttcagctccatcaggtcatttaaggacttctctacactggttattctagttagctattcgtctaaccttttttcaaggtttttagcttctttgcgatgggttcaaacatcctcctttagcttggagaagtttgttattaccaatcatctgaagcttactttcgtcaactcaccaaagtcattctccttccagctttgttccgttgctggcaaggagctgtgttcctttggaggagaagaggtgctctgatttttagaattttcagcttttctgctctggtttctccccatctttgtggttttatctacctttggtcgttgatgatggtgacatacagatgggattttggtgtggatgtcctttctgtttgttagttttctgtctaacagtcaggaccctcagctgcaggtctgttggagtttgctggaggtccactccctgtttgcctgggtatcacaagtggaggctgcagaacagcaaatattgcagaacagcaaatgttgctgtctgatccttcttctggaagctttgtctcagaggggcacccggctgtatggggtgtcagtcggcccctactgggaagtgtctcccagttaggctactcgggggtcagggacccacttgaggaggcagtctgtccattctcagatctcaaactctgtgctgggagaagcactactctcttcaaagctgtcagacagggacgtttaactctgcagaagtttctgctgccttttgttcagctatgccctacccccagaggtggagtctacagaggcaggcaggcttccttgagctgtggtgggctccactcagttcgagtttcccggcggctttgtttacctactcaagcctcagcaatggtggacgcccctcccccagcctcgctgctgccttgcagttcaatctcagactgctgtgcaagcagtgagcaaggctccgtgggcgtgggaccctctgagccaggcgagggatataatctcctggtgtgccgtttgctaaggccattggaaaagcacagtattagggtgggagtgtctcgattttccaggtaccgtctgtcacggcttccctttgctaggaaagggaattccccaaccccttgtgcttcccgggtgtggcaatgccccaccctgctccatgggctgcacccactgtctgacaagccccagtgagatcaacctggtacctcaatcggaaatgcagaaatcatccgtctaatgcgtcgcttatgctgggagctgcagactggagcttttcctattcagccatcttggaacctttttttttttttttttttttaaagacagagtcttggtctgtttcccaggctggagtgcagtggcacaatctcagctcgctgtaacctccgcctcccgggttcaagcgattctcctgcctcagcctcctgagtagctgggattacaggtgcctactatcacgcccagctaatttttgtatttttagttgagatggggttttaccatgttggtcaggctcgtttcaaactcctgacttcatgatctccctgccttgtcctctcaaagtgctgggattacaggtgtgagccaccacgcctggctgccaatatgtcttttgattgggaagtttaatccatttacatttaaagtagttactgataggaaaggacctactactgccatttggttgttttctggatgtcttataggttttttgtgtccctcctttactctcttactatctttctttgtgtttaattgattttttttttgtagtgatatgcttttatttctttctcatttccttttttatctatagatattttatttgtggttaccattgcaattacataaaacattttaaagttatagcattctattttaaactaataacaacttcaatcacatgcaaaaactctactcttttacaattccacctccctctccctgctctgattgatgtcatgaattcatctttatttattcatatagatttaaatgtttaaatgtttttgtgatttgaattctatgcaccaaaaggataatagtacaaattattgtatttatccatgtgttcaccttcactgaagaactttatattatcctgtggttttgtgttgctttttactatccttttgttttaacataaagtactccttaatcttttttattttagagcacatttaatggcaaagaactccctcagtttttgtttaactggaaaagtgtttatttctccatttttgaataacagttttatcaaatacaatattctttgttgacagtttttttttctttcagcactttgaatgtatcctccctctgccttctggtctgcaaagttaccactgacagatcctctcataatcttatggaagaccccttacatgagacaaattatttttctctcgctgctttcaagattttctttgtatttgactttagacagttatataattataatatgtcttggtatggttctctgttgatttaccccagttggaggtctttgagattcttgaatttttaagtccattgctttcctcaaatttgggaaatgttcagccattatttctgtaaataaactctttgcccctttctctctcttctcttttggaacttacaagtgcatatattgatctacttgatagtggcccatacatcccttaggctctccttgctcttctttcttttttttttcttatctgactctatgatttcaaatgacctctcttcaggtttgcccagtttttcttctgcctgatcaagtctgctgtcaaacccctcttaaaaatttgtcggttcaattaaagtgtatttcagctccagaatgtctggtttgtcctttttaatagtttctatctctttgttgatattctcactttgttcatgcatcatttcctgatttttttttaaagtcatctatctgttctcttttatctcattgagcatctttatgacaactatttcgatgttttttctcaagcagctcatagatctgtgtttccttaagatcagttttgaagttttttattttgttcctttgattgggctacatttttctgtttctttgtagctaattttgtttcatctagaaggtcagaagcaaaaaatgcttgctaagtctgattaaaagagccccagtaccttcaaggcctgtctactgtggtactggagtgattatttctatcttatcttctttacagcttggtctggagagctgccttagactctccaatgaatctattcaaatagctgcctctgttaccttgacttgtctcagattccgttgacccaagatgggtcctggcactaggaatataagactgcttccattattttgacttgctccaggttagggagaagattatgcaaggctcctactgactgtgttttatttctagctttgatgtctgggcactgatttccctaggtttaactacttgctccatgttaaggccatgctgtggaaatctgtctgtgtgactgtcatgcaggcctgtctatgtgattgtcagggagaattggcctgccacaatagggccttcaggaggtgattaagtaatgaagtcagagccatcatgaatagcattagggcctttataaaagagaaagttcatgggtttgctctctgctcttccaccatgtgaagacacagccttcatctccctttttctcttctactgcttccactatgtgaggggatagtgttcaggccaccatcttggaagcagagatcaaccctcagaagtgtgagaaataaacttcttttgtttagaaattacccagtctcaggcattttcagtgaaaacttccatagtgatgatttccagctttaattagctcatactctgtgccctgtcctgcatgaagtgtttcatatgtgttgttccactccatcctcataacatccctgtgatgtaggtactaggtggtgacgctgctgctttgcatttggggtcactgaaacttacagaggtttgttagcctgcccaatgtcaaaaacaggaggaggccaggcacggtggctcacacctgtaatcccagcattttgggaggctgaggcgggcagataggttgagtccaggagttcaagaccagcctgggcaacatggcaaaacctcatctctacaaaacgaaaatagaaaaaaactagctggacatggtggtacgcatgtagagcaggtaaaatggactaagacaagcttgccaaacatcaccaatttccctacaccttttactgaaatcttttcttggctttataatggcttgggtgctgtagcttctcggctggtctctggaattctcacacaggtgctctggcccatatattgttgttaaccttatgtctctgagcagaaggagggccgagagctgtttagtccatcatcttgctgacatcactgtgcaatatattttgacgtggtcgctgcaactgctctgtagtcaaaggcccatctatgagaactgagcaccacatcgccatcacagtggcccctcctgccccttctcttgccccagtggcctcctgccacccctgtggcccctggttctcctgcacacagtggcagcccgttaggtgccgattccccaaggctcatcttccccaggtgagctgcatctcttctctccgcagcactctggcccccagaagcttctccacattgcccaggagctcctgcacaccgaggagacctatgtgaagcggctgcacctgctggaccaggtagcccacatggcttgggggcagtttcagtatctcttagcattggctgggcattataggtgcagtgtgaatgacttaaatactaaaactcagacaaatttaagtctggtctacaaacttttttttttttttgagacaaagtctcactctgtcacccaagctggagtgcagtggcgcgatcttggctcactgcaacctccgcctctccagttcaagcaattctcctgtctcagcctcccgagtagctgggactacaggcacatgccaccacgcccagctaatttttgtatttatagtagagacggggtttcaccatatttgtcaggctggtcttgaactcctgacctcaggtgatccaccagcctcggcctcccaaagtcctgggattacaggcgtgagccaccacgcccgtcctagaaacttattttttgttttcagtgcttgtagctctgaggagaaggctttgccaagtcacctgtgggacatttcttcttggcagctgcatgatctgagcatgtaaatggcttctggatgtttttctgcataagtacttgggacagggtttgccactcatctctatccacatgacaacgtggggtttatgagcacaggaaataaagcacccatggaagctggggttttgacagacagtgctgctgctgtttttatctcacgagaaagaaaaggaagtctgaaccttccatttcgcatgagaggtggctgaggaaagatgtcattccctgtcctcaggcgactgtccctgcctcacccacattcgtaagtcataagtgagcttgcattaagaccatgaggttgtctgaaccagttggatgaaaagggaggacaataattctgaaattcattaagaaaacacaaggtggcagcagcggcccctcccgagcgccctcacctgtggccgaagcggggcggcaactgtgctcagtggaagaggctcactggccacacgtgggcttctctatgctcaggttttctgcaccaggctgacggatgcggggatccctccagaagtcatcatgggcatattctctaacatctcctccatccaccgcttccacgggcagttcctgctgccggagctgaagacgcggatcacggaggagtggtgagtaccatctgcgcatgcccatggggcccctcaagtgttctctagacctgggttcatgtgcctgagagcgaggcaagtgctgggggactgtctcatggtggctgggcgcctcccttctctgcacggtcctgggtccgatccagactccaccccttcctggttggtgaccttgaccagccacttacggtctccaaggcttagttcctgagaaagcagatgatgcggaatgaagggcttttaacgccccacttggggctctgaaactaaaatgaggtttgacatctggaaacaccacacagtggatagtgctagttggttttcttttccctcctagcttatactccacctttgttttaaaaatgctgtttttccctctcaacagtggacctcagatcctcctcctgctgtccctgtggcctgtccctctgtcccactgctgcttctgttcattagcagagggacagctcagtgcaagtcacaattcatgaaacatcccaggctggcccccagactcatcagttccccacgttgcgtgttgcgtttcccctcattctgggtgccgctgctgtttgacttagggtctctactgcctgtgcccttcgcaggcccggcttccctctgcatcaggagcctggcctttctgtgtcccaccagcccgttctccaagctgcaacccaggagaccacagaggcttgactggaatgggaggccagggggagtcccttcacctgttgctcagggaggggctatgtcaatttataaatctgtacaaggacatggtccagctgccgaacaggtttacattgtgtccccgaggcagtcaggactggatgcagccttctggctgacaaaaatccatgcttggtagagacaggttttctcctgcaaggccctggagactgctaactcatgagtgcatgtgtgacctcctctgcaacttttataacagcacaggggtccaatgacttagccaccctgccctttggacattttttttttttaaacagagtctcactctgttgcccaggctggagtgcagtggcgtgatctcagctcactgcaagctctgcctcctgggttcacaccattcccctgcctcagcctcccaagtagctgggactgcaggcgcccgccaccacgcccggctaattatttgtatttttttttaagtagagacggggtttcaccgtgttggccaggatggtctcgatctcctgaccttgtgatctgcccatctcagcctcccaagtgctggattacaggcatgagccaccacacccagcctggacctttaaattaaatgtataagtgcagttcacagtcatgccttagtgatggctttgtgcctgtggcttttttctttctttttgaaacagtcctaaggtcaaagacgattagtatatttttctgtttcttgaaaattatttgcaaatctctgtccaaagcagcttttttcattatcagtactacaaagagctactttccccaggacttcgccagcattggatagaaccattgtttctaatctttgcccatttaaaaggagcataatggtattttgttggttctctttgataactgtggttcatcattcaagcgattctgctactactgctatctcctgtgtctgggtcactggttctaagcttgcagcttgcacttttaactgttttacaggcatctttcatttaattgcccagttactattttctactctacatgacataggggaggaagctaaggctcagagagggtgaccaatttgctcaccatcacacagagctggcctccaccccacacccccctggtggagttcatgtccactaacctcagagtccccattgcacccagctatttctctgatgattcatttctccacgaagggacacaaacccacggctcggggacatcctgcagaagctggccccattcctgaagatgtacggcgagtatgtcaagaactttgaccgagccgtagggctggtgagcacgtggacccagcgctccccactgtttaaagacgtcgtccacagcatccaggtaaggccggcagtgggagtgtggacacagatgttctcaagatgcacagagcctggtgttttattttttaaaaacatatgtatatatgtatattttactccaaaaagtaacatgacattactaaaattttggaacatagagaaaattaggaaaattatgggatgtgcccagatgttctgttgatgctttgagccttacaataactcccagagatgaatcagcattcccatcggaaaatcgtggctcaagaggctgtgcaagctacagcatcacgagctattatctgatggaacctgaattcaaaggacagtctctgattgcacagtgtccctcgatatctagtgcaggcatttttgtttaaatgttacattgcttttttgtttttcgctttctgctaagagcctcctcacagccctggcttctcttgtctcctatagggctggtctctttcttcttgattcacaaggcttttatatgctaagaacatcaacttctttctgtcatgcatgtcacagattattttcccccattgatcttttatttttttattttatttttttttttgagacagagtctcactctgttgcccaggctggagtgtagtggcacgatctcggctcactgcaacctctgcctccagggtttacaccattctcctgcctcagcctcccgagtagctgggaatacaggcgcccaccaccacgcccagctaatttttttgtatttttaggagagatggggtttcactgtgttagccaggatggtctcgatctcctgacctcatgatccgccctccttggcctctcaaagtgctgggattacaggcgtgagccaccgcgccccgcctgatcttttaactttatggtggtgtttgccatacagaattttttattttttatttttattcatttattttttaattttttttgaaacagagtctcactctgtagcccaggctggagtgcagtggcgcgatctcagttcactgtaagctccgcctcccaggttcacgccattctcctgcctcagcctcctgagtagctgggactacaggcgcccgccaccacgcccggctaattttttatattttttagtagagacggggtttcaccatgttagccaggatgtctcgatttcctgaccttgtgatccacccacctcggcctcccaaagtgctaggattacaggcgtgagccaccgcgcctggcccagaattttttatttttaagtaactccattcaccacttcttaaaatgtaaagcttattttcaaatgcatttcccactacccaagactatataaccccatctctactaaaaatacaaaaattagctgggcgtgacatgcctatagtcccagttactctgaaggctgattcaggagaattgcttgaaccgagaggcagaggttgcagtgagctgagatcgcgcctgccatgtcctggatgacatctgcctggggacactcgaggcagacacagccccggttgcaggctagccactggtctgtgcatcccctcatcctaggcagattgggcacagggccaggcaggctgtggggagggctctccgcctggactcagtaccatccagccattccctgaaggtgactttgccccccggggatcccaggccatatcttcacacattgggtgcacccagcatctggtgggtggggtctggggatgctgcaaaacacattgcagcagacagcatggcccaccgcagagaattctccaacccgaaggtccatagtgcccaggctgagaagacctggtgtggaaaaaacaggatcgcatgacagtcaagttgcccatggccttttgcaggtttccttcctttaatcaaaggatattttaaacgttaaacttttattttgaaataactttaaacctttacaggaaagttgcaaaaatgacattgttatgcattattaacattttgtctggcttactttattattccctctaaactcatacagatgatgatgacttttgagcgttttgaaactaagttgcagacaccgtaaccctttatcactaaacatgtgaacaaggatattctcttgcgtactcccagcacagtgatcaaaatcggggattttacactgatgtcctggtgctatctactccgcagcccacactcagatgtcaccgattgtcccaataacattcttgttttctgatccataacccaacccagggccacacattgcgctcattattgtatttgtcctcttgggtctggaacaggcctctgtccttgtctttttgaggggtgcagcctagttacttgtagactgcctgcttgggtttttctgctgtttgtccacagtttgattgaggctgtgccttttcctggagtgaggctgtgctcttctccctgcgtcctgcccggtgacgcagtctctgcatcccattcctggggatattcacttgataaagggcgtgtctgtcaggactcttcaggtgaagttgggttttttcccctattaagtttcttggccgcttgtggtagctcacgcctctaatcccagcactttgggaggcccaggtgggcggatcacctgaggtcagaagtgcgagaccagtctgggcaacatagtgaaaccctatctctactaaaaatacaaaaattagctgggtgtggtggcacactcatacctgtaatcccagctacttgggaggctgagacagaattgcttgagccggggaggcggaggctgtagtgagccaagatcactccactacactccaggctgggcaacagagcaagactccatcaaaaaaaaaaaaaaagttttggccaggcgcgatggctcacgcttgtaatcctagcactttgggagaccgaggtaggcagatcacaaggtcaggagttcgagaccagcctgaccaatatagtgaaaccccatctctactaaaaatacaaaaattagccaggtgtggtggtgtgcacctgtaatcccagttacttaggaggctgaggcaggagaattgcttgaacctgggaggcggaggttgcagtgagccgagatcgcgccattgcactccagcccaggcaacagagcgagactccgtctcaaaaaaaaaaaaagtttcttgtagggagatacttggagattatgtgaatatcttgacagaaacagttgtttttatgaagattgtcgacttgggtttctctcaccctgttgtatcccaggcatttttgagctcatctgagctggaagccgttctgttctgggccctgagccaggtgagggtggttgaggcccttgagttgctggcaggtgggtggggaagctggtggacaggacgacaaagtcagcaggccctcacaggctgcccagtgggcatcatcaggggaggcagaggcaaagtggcctgggcaggaggacccgattggggagcacagaggcgacaggtgggcagcattcagcacacgtgtctggggttcagatgccagatggagacatggcagcaaggaggtgctgcagggtgcgaggggaggcacagggagccggtgagcagagctgggtacacgtggagcgcgagggtctcagcacctgattggaacactggtgcgtttatatcgagagcgatctgcagaaggactccccgagctgcttctaggcataaggacaagccctggcccgatacccagtggggatggttgggcgaagctctgcctgatttctcagcagaggggtcgaaggagccctgcttaggcccacgggtgggtgagagaggggaaaagccactcttgacaggaggagacagtcctgtccaggcatttattttctccaccgaggatgcgtataagagagccagctctgggccaagggccagcctgcctggggttccagttcttgctccattggtcagtctctctgagcctcagtttccctcgttgtaaagtgtggtctgtgtcagccatgtcttgaaggacagtcagttctgggcagccagttccgggcagcttcctggggctgtggtggccagaagccggtggggctggcatccacacacgtgtccttggagtgcccaatgctccctctgtccccacagaagcaggaggtatgcgggaacctgacgctgcagcaccacatgctggagcccgtgcagagggtcccccggtacgagctgctgctcaaggactatctgaagaggctcccgcaggacgccccagaccggaaggatgcggagagtgagctggggccaagggctcccaggagggtgcaggggcacctgccaagaactctgggggtggggagagagggagagagagagtcgtggggtcatgggggtaggggagagagaaacagagagaccagagggaaagagacagagacagagacagaggcaggggagggagagagatggagacagggagagagatagggagatgtcagggaaagagagggagagggagggagaaacagaggggaggagagagagacacacagagacagaggaaggagggggagagagagagaaagagagagaacaagtgagccccctagcagcccaggaagggacttagcatctttgagggcagagaaaaatctcccctgcttgaagtatgcgggtggacattggtctggggaaggtgctactaaatgctggccctgttcagagcttaggccccaggaatgggcctcatagggctggtgggggctgctcctggtccaagggcagcaactggtgtggctggcaggcagcccggacaggcgtctgtgcagaatcgtgggagccccctgcctggtattggccccagaagggatgtgtctgcagggtcagaggcagggtcacccccttcctctgggccagtcctctagagtagcccaggcaccctgggaaaggctgagggcagagacagatcctctctctggaggcagctgccctggagcccctcaggcaagcaaaaacggagccaccgtggccccaggctgaacacagtcttcttcctgcagggtccttggagctcatctccacagccgccaaccactccaatgctgccattcggaaagtggtgagtgtggggctccagtggcgaccggcagggtggtgcagcaagagtgagggccaggggcccttgtgggccagcccctttgccgctatcctttggggggctccacaagtgactcttttatacctccttccacccccatccccaggggggtcagctggacagccccgccccttgctataatagacctgtgtccttggtgagttatttagcactctatgccttagtttccccatctataaaatgggagccccgacagagcctgtctcactgggcatctgtggagagtaaaagaatcactctatgggccgggcgcggttgctcactcctataatcccagcactttgggaggccgaggcgggcggatcatgaggtcaggagttggagaccagcctggccaatatggtgaaaccccgtctctactaaaaatacaaaaattagctgggcgtagtggtgtatgcctgtagtcccagttacttgggaggctgaggcagaagaatcgcttgaacctaggaggcagaggttgcagtgagccgagatcgtgccactgcactccagcctgtgcaacagagtgagactccgtctcaaaaaaaaaagaatcactctaggccaggcgcggtggctcacgcctgtaatcccagcaatttgggaggccgaggcgggtggatcatgaggtcaggagatggagaccatcctggctaatatggtgaaaccccatctctactaaaaatacaaaaaattgggcatggtggcaggcgactgtagtcccagctactcaggaggctgaggcaggagaatggcatgaacctgggaggcggagcttgcagtgagccgagatcgcgccactgcactccagcctgggcaacagagcaagactctgtctcaaaaaaaaaaaaaaaaaatgtataacaaaaaccagggggaaaaaaaggaatttcctttgttttctaagtatccattatgttccaggtactttccctaggcagtttcatttaattatacaaatccaagtcttttcacccaaaactcacacacctctcagagaacagctgtttcatgactcctaaaacactaaggagagtgagagctgcaacatgtccagggtcagccccaagtcctgccccacaaagtggtccccggcctgccccggaaagtgtcagccatgtgttaccatggaactcagccctaaatggcctgagcccatggcaactttgtgttcaaaagcctcagcaaggccaggcgtggtggctcatggctgtaatcccagcactttggaaggccgaggtgggcgaatcacttgaggtcaggagttcaagaccagcatggccaacatggtgaaaccctgtctctactaaaaatacaaaaattagccaggtgtggtggctcacacctgtgagccaccaggtgtgggcggtggcggggtgtgggggggggaagaatcaatctacatagaatgctcagaacaggacctgcctggtgcaggaagtgtcaatgctcagtgttattgtcattcattcactcactaaagctgcattagtcccttcatggactggctctgtgctcacccagccccctgggacatgacaggtgcacacccagccctcttagtgcacaccaggtgcttgcccagccctcccagtacattccaggtgcatgcatttctccactattagacaccagctgcacacgcagctccccagtacataccaggttcacacccagcccccctggtacacaccaactgcacacccagcccccagtagtgggcaggtgcacacccagctcccctgtgtatataccaggtacctgcccattcccccagttctcaaaagaccctcacccctaccctagtctgctcctctaagctctctgctgctggctcctctggtgccccccacaccctgtgcccacttgcacctacctgcattggtgccagagacggaagggtcagccaaacccagccgcctccaggatgtacaggctgagatcactcaggtccaaggacggggcttccaaggcacagcaggtacagactcagacatgtggctgttgtcgaggttgccgcaggctcacctctgcgttctgctacactggcgtctggctcagagctgaagcatgagctttgacgctgtcccatcgcacttctgggtgctggttacccatgtgaccaccccaccagtcaccatggtcaggggaaggtgacatatggattgtccgagtctgggtctcagatactcaactgaccgctctgtgcctcagtttccttgtctgtaaaatgaagataacaatggcactcacctcactaggtgagttaaaacatgtatcatgtagaacagcacatggctcacagcaatggttagctctgttcctgtttatcgttgtttttatgctctgcatggtgaactcctattcatccttcaatacccaactcaaacatcactctgttttccctcccacccttgtcagtagctcattgccctctctggattctgggccacggttgcagggaaggactccgtgcatctctaggtcaccagccactctcacagacctttggtgcctgagtcccatgtctcttgcaggagaaaatgcacaagctcttggaggtgtacgagcagctgggtggggaagaagacattgtcaacccggccaatgaactgatcaaggagggccaaatccagaaactgtcagccaagaacggcaccccccaggaccgccacctcttcctggtgagcctggcccctgccagcccagccgcagagcctcccttgccatttgcctcaagcccagggcagtgccaggagggctctggctgcccaaggacatggctcttctgtggcctctcctactgggactgtggctccctctgagaccctcagcatccctcccccagccatagggagcctccctcctccacatccagacaccaaacttttgccagtggctcttccccatttgctgcaaatatctcattttttaatccctcgtagcccatacctctttcgtccccagaactgagcagacttcagcttgtagcaaccaggacagcacagagaactgtagcagtgaatcacagtttcaactattcctgagccaaaccctggccgggagggagggggaaggtgggatggaagtgtaattcgagacccccccgggtgccatggcgcggtagaaacagatgtggttcttctttcctcctccattttcctctagcttctgattctccttgaataaacaattatttctttgaaaggtttttttttaagtttttaaaaattacgttaactaaaactcatttttgctttacagttctgagttttgactaatacagttgtgaccacaatcaagttacagaacaagttttttttgtttgtttttgtttttgtttttaagacagagtctcgctctgtcacccaggctggagtacagtggctcaatctcggctcactgtaacctccacctcccaggttcaagcaattgtcctgcctcagcctcctgagtagctgggattacaggcgtgcgccaccacgcccggctaatttttgtatttttagtagagatggggtttcaccatgtttatcagtctggtctcgagctcctgacctcaggtgatccacccacccaaagtgctgggattacaggcgtgagccacctcacctggccaagttacaatttgatcactgcccccgcccacccccccagttcccttgtcccacccctttgtgagcaagcgctcgcctgccctggcaaccatggatctcttctctgtttctagaattttgcctttcccaaatgtcacatcaatgccatgagatgagtctggctcctttagctcaccatgtgggtttgagagattcatccatgttggtgaatgtatcagtagctcattcaaaagatttggtttggctggacgtggtggctcatacctgtaatcccagcactttgggaggctgaggtgggcggatcacctgaggtcaggactttgagaccagcctggccaacatggcgaaaccccatctctactaaaaatgcaaaaattagctgggcgtggtagcacccgcctgtaattccagctactcgggaggctgaggcaggagaagctcttaaacacgggagacggagtttgcagtgagccaagattgcgccattgcacttcagactgggcaacgagagcaagactccatctcaaaaaaataaaaaaaggtttttttttaaattatacaattagctcatgttcatggtttaaaaatttaaaaatagaaatgaacaaaaataaagctagcgactagagtctcctcactcaaagatgtaaccatagttaaaattactgcacatatcttttaaaaatatttttcactttataacattaaaaaaaaatgaaaaggatcccatgtgagaagctcactggggcccctggggggacctgcgggcagctctcgttcctcacctgtgccatccctcttgcagttcaacagcatgatcctttactgtgtgcccaagctgcggctcatgggccagaagttcagcgtccgggagaagatggacatctcaggcctccaggtgggtgagctcctccatctcaaacctgtccccctggaaggggcactgagcaggactggggacaccaggctctggccgctgaggcactcacctctgtgcagcctggcacccctacctgcttttccaagccatagaccctatctgtgaccaaggcattgtctcagtcctggtgccccaggctggaagggcaggattccacccttctctgcttggcccacctgccacgttgctgccaactcccctttctgcagagccttggaggatgcagggggcagtagggatggcaccaggacctggactgaatcctgtcacctgtgagactgggactcggggccctatttacaaacccaaacatgaagcccagggttgcagggagcaatcctggctggggcgggggccggcttcccttgtctggttcctgggtcctgagctctttcctgtcctcctgcaccggagccggggggagggttccaggcagatctgtagcatggtccagaatgaccttcttttttttttttttttttttttgagacggagtctcgctctgtcacccaggctggagtgcaatggcatgatcgtggctcactgcaacctccacctcctgggttcaagggattctcctgcctcaccctcctgtgtagctgcgattacaggtgtgtgccaccacacccagctaatttttgtatttttagtagagaaggggttttgccatgtttgccaggctggtctcgaactcctgacttcgtgatccacccgccttggcctcccaaagtgctgggattacaggcatgagccaccgcacccagcctagtcagtcattatttttaatggtatttcttaacctggagtgcaatggtgtgatctcggctcactgcgacctccacctcctaggttcaagggattctcctgcttcaccctccagaatagctgtgattacaggtgcgcgccaccacgcccagctaatttttgtatttttagtagagacggggtttcaccatgtggtcaggctggtctcaaactcctgacctcgtgatccacctgcctcggcctcccaaagtgctgggattacaggcatcagccaccgtgcccagccatgaccgattttttgtagagaaacactagaaaagtggtttcttctaactactataaaaagctgggcacgtagtttcgctggctcacgcctacaatcctagtactttgggaggctgaggtaggaggatcacttgaacccaggagttcgggaccagcctgggcaatgtagtgaaaccgtgtctctataaaaaataaaaaattagccaggcatggtggcgcacatctctattcccagctacttgggaggctgaggtgggagaattgcttgagcccaggaggtcaaggctgcagtgagctatgattgtgccactcacagtgctccagcttggctgacaggacaagaccctgtctcaaaaataattttaaaaataataatgaaacaaccttaaaaaaaggtattttctctagttagtgttttttttcttaacctgaattcagagaatttcaaggtaagaagggatttttggtggcattaagcaaatgattacatattttgatttagcaaatatttttggagcacccattaattcaaagccctcccgacaggggacagggacccattccagtcccccaactaccccactgcaatgagacatggaacaggcgtgagctactgcgcccggccatggtctctgtggtcttatcctgatggaagaggatggaatctgtggctgcggttctatgaagaagtgaccccattttcattagttctgggcacacattgtcctatttacatgtctaatctcagggcgcacctgctcaggggctcagactctgcagggtggctaaggccatccttgctcttctcatcagatccctttccatcctaaggggacgtggctgctgtggcgggcagtgcccagtggtgcctgtggggaatggcttggctttaaggaggatggatggggcgacatggggaggatgcctgacgggctgggtgtcgggggggtgggtttggtcagcagagttccaagcacagaagatgagcggtcatagctgtgtctgagcaggatgggaggcccgctgtccctgatggaccagctcatgtagcagccacgctgacctaagcctctgcacccctctccctgcagaactgtggggctgcaggctcacctctgttacctccttggggaaacacttctaagtcagaaaacatgaggctggagctaaaatgaccagcttgggtttgctttgttctttgttcttgccccttcaggtgcaggatatcgtcaagccaaacacagcacatacattcatcataacgggaagaaaaaggtccctggagctgcagacgcggtatggaacgggctgtttctagtgaatgtctttgacctcatgtcttctttttctaaactggttaaccttgtaatatatttttatttatgcatggcttaaaatttaaaagtactgttactgaagcaccagggttccgtctatgtcctgcgcttgctgcacagaaagccaatcactgagatgattattgccaaggaagaagctttaattggccgaggagatgggaactcagtctcaaatccatctccctgaccaactaaaactaggggcatacacagcagggaataaatgtaacaatgtgtaagaaaacaggaactagggaggggcaaggaagcaatcatgatgaataaagggtctgggcatctcattgtctggatgtggtgacctggtgagtttcagtcccttgatggtttttttgagaggcctgaaggtgttttctgaggaaggaactcagataaaacaaatgttaactttcaagctttaagaccagaagggtcaatttgtatgtttatcagataaactatctatgggactcggggcggttttagtaccaagggaagttgatgaaaattaagcctctgcccacctcctgttcagcaggcccagcacgttcttagtcctctcttgagtatcctacgattttcttttcttttttttgagacggagtttcgctcccaggctggagtgcagtggcacaatctcggctcactgcaacctccacctcccaggttcaagtgattctcctgcctcagcctcctgggtagttgggattacaggcacccgccaccacgccaggctaattttttgtttgagtgaaaacccaacggggtttcaccatgttgcccaggctggtctcgaactcttgacctcaggtgatccacaccccctcggcctcccaaagtgctgggattacaggtgtgagccaccgtgcccagccccttctaggattttctatgcacatgcacatatatctatgttttaaatcacagatggctgtttactgtataacctgtcctgcaccttgctttttcacttaatttgtcaagaatcatcccatatctgcacaccattcctaaagcaacacaattttccattatgatcattagctagttcccactgacgaggacctgcgctcctcccgaacctggccatcacaaatgcggctgcaagcagtgtccttgtttttaggtgtttctgcatatgtgtaattgtagccgtcagattgctgacatagatttgctggtcacagggtagtgcatctgtttgaaatgttggtggctgttgtcacactaccctttaaggtgatgtcaggctgtgctctgactagccatacatgggagttctgttctcccacaccccaccaacagtgggatcttcataatgacccattatggtccaaggaggcattgaattacagccactgcagagggctccacatggctcacctggccccaccaggccacgagtgttttgaggcccttggggccaatcttccaatccttgagctgcgttgacaagccagtgcgtggctcgggtgtgctgcagggttgagagagggctggtcatttagagtcagtatccaagactggattaatacaagaccgttttggttttttaggacagaggaagagaagaaagaatggattcaggtgaagcttctaaagttgtaaagtaaccaaatgaccaagtgattgagcagtaaggccattcatgttggttcagagggtgggggccctggcctccgggactgctggccctgtgctgtaccctgcagggatgcagtgaccacactgtgccttcataagcagcttcagatgccacaagcccttcaacccattcatttctttgagggcccccaaataaacatgagcgggcctggtggagtcacaggccaggttccccgctcagggtggatctcctcaatctggacagctccaaggggagaccacatcattggtaggggggaagggagatggccagtggcctgggcattgttctgggaacgccaaggcccgtcctcgggacagaggcaggcgcgtccctcctgtgggtagcatcctcccatgcccctttatagtcctcactgttgtgttgctgtgtccagatcatccaggccaccatcgagaagcacaaacagaacagcgaaaccttcaaggcttttggtggcgcctttagccaggatgaggaccccagcctctctccagacatgcctgtgagtcagtggcccggggtgcagagagacctccaggggacgggctacctgtggagagcagaaggcactggcgtctgggtgggcagcttgacctccaggctttcctcctgctacaccagggaccaggacagcgggcactcccttgtgttaaaataaaaacttaagacaaattaaatttaacaatttaattgagcaaacaactatttgtggatgggataacacccaccccctacaacccctgagaccagaataggtccagagagcctcctgtgctgctgtgtggtcggagaggatttatggacagaaaaaggaaagtgaggcacagaaacagctgggttggttacagttccgcgtttgccttatttgaacatggtttgaacagtcggccacctttccatggcagctttaggctgaacttaatttcacccctacccaccctccactaagtgccgctgcagcctgctgggccccaggcccgtggtcagcgcccagctgggcgggaaagcaggatgtgggcgtggaggaagcgctccttcatgacctgtttggttgtctggtgccttctgcacagcatcctacacacaaaggtatgttacatcatccccacagaaactgagtctgaggagctctgtgacgtccccaggccatgggtggtggaactggcatcacagggctgtggtgcgctgcccgcgtaccactctgtctggtctagcacagcctatgactgcagacacctttctgtgtttgtatttccctcccagtgcccccgtgccctgggagatggtggctcagagccccttgagggaagcaataggagcatctcactccccatcctcacgtggagctgccccaagggcccagggggatttcacatggagacttaggctgggaaagaggcggggctgcagggtccttgccgagaagcctggccagggagtcagggctgcagccccagggccaatccccggccatttctcctcccggggcttccctggagtcagggagagaggattgggtgaggaggccgatctctgcccgctgcgaggaaggccctggagtcactggccctggacaaggcataggggttggaagtgtagcaaggacatatccagggaggcacccaggagagacggtgccctgaaccctatgccaggccctctgctccagccttcacgggggcaccaggcatgactcagagtgagggtgccccaactctcgccgcctgacccagaccccgcaggcctgaatcccaactccaggctggttctgccctccctaccacctccaggggtctgcctggcacagcccacctcccccatatccacttcatatttgtatcaagtccgctaggttttttctgctttctgcatttactttgcaagaactttgcaccatccagaaagaaagagtcctgggactgccttgagtggaggtgacctgggaatgtgagacactgagcctggctgtccttaagtctggccaagccctttctgttcagaggctgagcccggagcctcactgtgctgagaaagtcggggagctgcagagactccacaaggaaccctggaggatgagagagaacccaaagggaccctccttactcactgggtgacttggtgtaaattagagcccctgaatagggcgggccagagggaggcatcacccaccagccacccacctcactgggagatgctccttctaggagaggcctccagctcaggccaggcccagggagggagcagcttccccagaggcacagcaaatcctaggcctgggaaatcctgctcccgagcctgccctcaatgcacagaggtgctgggggcttcaggaactgtccccccgctgcacagtggctgcgtggccctggaatctcctctcactcggcctctgtgtcccttctagatcacgagcaccagccctgtggagcctgtggtgaccaccgaaggcagttcgggtgcagcaggggtaagtgccccatgctcagcggtcagcaggggtgaaaggcagagcagggggtcagaccaggatgacctatagggaagatggagagggagggtcagaccagggcctcctggaggcggagggctgaggggccagtctgccctgctcactgtgactgggggcctgggtgtgcggaggtgaagctatgtctgagtccaggcactgatgaattgtgtggtcactgcaggggactctgtaaggtgggcacgcagaggcctgtcagtgtggggatgtccattacctggttggaggtggtcacacagctgggcacacatgtgagaatcttctgagctccaagtgaacatttatgctcttaacatgtgtgaatcgtcccataaagcatgtattaacagtgcaaggtccttaggaggctcggtaatgcagaggactgcttagttcttcaccccaagcagcggccagggaggcctaagcctccctgcctctccccgtctgtgttctcgtgtgccttatggcagccagcccacaagggtgctgctccggccaggcagactgtgtccacgcgcccgcctgccaggggatagggaactgggataaggcctgcctccctccgtttaatctgggaagttaaagaggatgagggccgagagcatctgtacctggagccatcatcattggtgcccaggcctggcactcaccaacgctgacagcaacatcaccgtggagcaccccgatgtggctgctgtgcccagatgcaggagggtgattctccaggtgcctcgcctcaccccatgctgtgcaggcccaggaatgacatggccccagatggctgccctagccccatccaagacgggtctttccaggtgggctggccgctggctgccccctcccatgacctgagctttaccaggccccacccatcatgatctgggctggccgggcactgggaaaccatgaagaaactcaggaggcctcgggaaagatgtagtgcttcaggggcacgacggagtgtggaggcgtggggggcttgcacatacatcccaacgggcaagaggagagaccccagattcacaaagcgcagccacctggcctctgcagagcagacaggcaccctgcagggacatcttattaacactgaaacgaggaagtctgacacggggtgggcagcttgggggaaagtggtgccctggcctcctaggagagaatctcctctcacttgtctcttcttgtgtctggcctcacccagcttcctggccaccctcccctgagatgccctgggttccccttgccctgctaggccccagggccttgacacctgctgtttgctctgtccaagtctatgaagccctgtagcctgccccgggggaccctgataaaaatgtctcaatgacaggaacccgcccatcagcaacttttttttttttttttttttttttttgagacggagtcgctctgtcgcccaggccggagtgcggtggcacaatctcagctcactgcaacctccacttcccaggttcaagtgatcctcctgcctcagcctccccagtagctgggactacaggcacgtgcaaccatgcccagctaattttttgtatttttagtagagacggggtttcaccatgttggccaggatggtctcaatctcttgaccttgtgatccgcccgcctcagctgggattacaggcgtgagccaccatgcccagcctatgatgggaatccgcccgtcagcaactttttgtattgccaaacagtaagtgtgaggctggctgtgccccagactcacagagctctttaggcccttttctggagcatttaggaaagttatgaaaagcaatgtgtactcatagtgtgagtgcagccacagaagcttgagctgcccacagtggacacacaatcgcagggtcacagtggggacgtgacagcccacacccatgcatatgaggcactgcctgatcagccccactgcctggaatcccacagccagggcagacatccctgacagtttccatggtgatgccctggcacagagcactgcctcccacacacacagctcacataaggtatgaacttggctggcctctgcctgatgaccctccatgtccagccccgggccctgggccaggcttatggagacatccgtggtcacagtcctgccgcagaggcatcaaggctcagtgagagccacctgtcgtttgtgaatgcgtctgtccttggtgtgagcccatacgacatggagaggcaccttcagtgtcttgggtaggcaaggaagcagaagtgggtggaggccacgtgctgagggatgccctgggtgggcaggacctgggcgggttgtaggaacagcaggagcccaggcctggctgaggggatccacacagggcgtctgagtgtgggacagggtcctggggagtctaacccccgggttggtgccctgacaggagaatgttctagctggaagaacctgcaaggccattgtttaaaatgttttaacttgtgggaagacacagcttggagatggccttggagcagggctttgagcaaatgccgcctcttgagcctcacttggctctgggcagagagatcagagaagctgtcaggcgctgctggccacacaggcaatgcccctattggccgcctgcctccgtcacaggcgagaaggtaattggggctcagggcctcagtcagtgtccgggcatctgctggaccaggctgtggccagcagacccgctgtgcctcgatgggtgcgcccagctgggtggacagcaccgcctgccccactccctttacttcccctggcccagggttcagctgcctcaggttctgcagcagcctggggagccaggtactcagggtcacaattccagttctggtctcttgtctctgtcccttacccacaccaagccagagctgggcccacgacagaccaccaaacaaccacagacctcagctccagcccagggcctccctacgaacagtggatgtggcctggcctggccctgtgttcctcactggtgtcttcctgtgagcaaaaacagcagagttgagactagggtaggagctgggacagctcagtgtctgtgtcaagctgcacagggtgaatgtggtgtgatggaggtgagctcagtgtgcgttttacaaagcactcaaaagcaagttcattctctcatcaacaacagtgatttttgctacagtataccaaacttcaacttacttcctgagcccaatttcttcagtggtatagtccctgtaagcccctttcctaggagaagctacacccaagccaggaagttttgcaaggggccttgcagaattcaaagccttccctgatgggcaagcgtggagttgctcttaacagaaacacaaaatgtcagaatccaaaaggtctcttagggcctcagacccaccatgggtgacacacgaacccctccaaggagccagcgaggcatctaagggcacccttgacaggccagtgccagggcctcttctcaggcactgcccctcctgggacgaggccacgccctgtgtccaccctcggggctccagggcagggctggagcagaggcatcaggcctcagcctggccaccctcctgttggaatagccccaggcagtgcctgcgcctcacagcctgtgtcccctgctgggtcatttcaagcagctgatgaaactgactcggtttcatcagggcctcttactgggctccaattctgtgtaactcagctgtgccccccgttcctggatgtgcagctcaatttgctcaagaaaaaatgctggagggggcagccccgttggcccttggtggagaccactttctgggtcaacgctggtgtgttttgggcgctttgggggtgaagtcactcggtcagatactgaggaagccacagttctccatgttcctggagagacttgggcccagcttttctgatatcccgacatccacaacgaaaacctgagctcccttttttgggtcaacctgcgtggtaacttcattcacaaaggggcgtgtgcatggccgagagagcatccctcgctactcaggtgggcctcttgcctctcagctactgcgtcatgcctacaaattcagccacaccttgatgatgggagctggagggttggcctcgacgggctgcggacctcagctccatgggagctggtgcagggccaggacccaccccaagtgctcagctcagttccatagctgggaagatttgccagataaaggaagccagtgggactcccggcactgcctcagccctgagccacactcactgcttccagaattgtcctctgtcccttcactgggacccggtcccactggtcctcagaggccaagctcttgctgtgcacccagccccgcaggtacctgtcctcccacatggttgttctttgctccttcagcccctgctgccccctgccccatgggcacgccctgtgttgttctcagctaccatgcagtgctgcccctgggtgccgtggccagggtcccccttccggggtcaagagcaggcagttctgggctgaggtgcacatcggggctgcccttccactaatcactcccacttcccagcctctctgggtgcccacctggagaagaggtttttgccgccaggtcagtgatgcccattccccacctagtgtgcttggagcccccactgtggtcttgggtgtgagagaaactgcagagggagcccaggccgcctcacctgtgtctttggagcaaggcccattcaacagaggtgccgggggctgcagcacagcgagtgagagtccctgtcaccctcaagccagccctgcccttgggctcctgtgccaagcaggacaggtgctggggggacctgcaggtgggccaatgaacggggaccacaaaccaggccacacagctggaagtgcccggccagaatttgcacagaggcactggtgtcagtttgttggggctgccagaacaaaatactacctgaggctgaagtctgagatcaaggtgtgggtagggttggtttatcctgaggcctcaccttggcttggagatgtcagtttcctccttgtttccacacatggtcttccctctgtgtctctgtgtcctcatctcttcttataaagacaccagtaagattgaatcagggcccaacctaagacctcattttaacttaatgtctctttaaaggccctgtctccaaatatagtcacattcagagttactgggaattatattttcaacatacgaatttggggggacatagttcagcccatcacagcctccaatgcttatgcccaatctgagccacccctttcttgcttcttcacccccaaccagttcagttcatctttttctttctttcttttttttttttttttttttttgagttgggatcttgctgtgctctccaggctggagtgcaatggtgtgatcacaactcactgtagccttgacctcccaggctcaagcgatcctcctacctaagccccccaaatatctgggactacaggcacgtgccaccacatcagctaattttttggatttttgttgagacggggtctcactatgtcgcccagattggtctcgaacttctggcctcaagcaaccctcccgcctcagcctcccaaagtgctggaattacatgtgcgagccactgcgcctgggcctccttctccttaaacctgaagagtttatgttaaactttttttaagcgtatgttgtttagcattttcctaaggcagttttggacccatacaagtggggataaccgcaatgagtatccctccccagctccagaaacctcagcctggtgctgttcttatggcccctcagcccctagccccgcacacacacacacacacacacacacacacacacacacacacacacaccccaattttctgtaatattttaaagcatatcccagacctctttttattctgctcagctacagtaatggtaagcttattttaggtagttttcttttaaacaggaaaaaaaaaaaaagaaagaaaaacacctgcaggcttcagtttccctgactggagaggttgagataaacatttctagtggcagttccagctctgacatcctggggaactcgatacatatctttgccttttcctaaagtcttcttaacagtggtttcggcacccataacaaagtgtctcaagggaggcacctcctccccagagaggaaatgctgggtgtggaccaagcttcaaaagcccaggaagttatttcatcaaatgatggggcctttccaggggttgcaggctattgtaacaggaaacggtaattagcaacttgccaaacgcagtcggggttttatgtactgtgatgaggcttacgacccagggaccagtcacccatcccattttacaggtgaggaaactgaggctcagaaaggagaggtgagtcatccagggttgcagggctgacaggaggcaggagactggggtctctccacctggcactgttcataatcagacagggaaaccaaggctggactgggcagccccaggctacacctgctccagcctccacaccaccctcctctgtaggcagttcaggcacaggagacagaggagggtacagcccctgaccctggcctcagctcttcatggcttcctcacatgtcctcacagtttttttttttttttttttttttttttttttttgagacagaatctcgctctatagcccaggctggggtgcaatggcgggatctcagttcactgcatcactgcaaccaacctccgcctcctgggttgaagcaattctcctgcctcagcctcccgagtagctgggattacaggcacccactaccactaccatgcccggctattttttgtatattttttagtagaggtggagtttcaccatgttggccaggctggtctcaaactcctgacctcaagtgatctgcccacctcagcctcccaaagtgctgggattacaggcatgagccactgcgtccagcctccccctaaaatgttgccatgcttgtctgcacactcaggcatgtgggtgcacacctatattcatccatgtggcgtgcctggagggtgtggcccgcggtgcccagtatagagcaggcgcatggccacacggctccagttgcagacagggatgcccccgtccccagggctgcaggccatggctgtgctgcccactgcccaccctagtaagtgctgtgttcctccagctgtggctcctttcaatagtttctcagatgcaccagataaagtcattggccaagttgttccaaacatgaagatcttgatccacttaaaatctttactcggtgccatgggcacaggcagccgctgggaggtgagggagggaagagagacgtggctgacttggctcttcacttcattcccttctgcatgttccactttttgccttgagcctgtgtggcttttacagtcacgagagctgccactccactgccgtgtggggtagggtgcacacatgattcagaagctgatggcatctatttgcctccttatagctcgagcccagaaaactatcctctaagaccagacgtgacaaggagaagcagagctgtaagagctgtggtgagaccttcaactccatcaccaagaggaggcatcactgcaagctgtgtggggcggtgagtcccgggagagggggacagggacaggaggccaccctgtcctctgctctgacagagcagctgagtcctcaccagcagcacaccagccatgcacaccagccctgcacggaagggcttcctgatcctggctcatggatatagatacccttgagtgcaaaactgtcctgtccgaagtagaatcaaatcacttttctctggtcagctctggtgttcaacaaacactacttgtggttgaaaaagtgctggatttggaaccagagaacccctagctgggtgaccttgagaacaaggagatgatagtcctcattccttgcaaggtgtattggagacgggtgaagggtgtggctgtgctggaagctcctactgctggcctttgccccagcgctccagtggtgctgaaggcctggtgggcccatgtgatgaggcaatgcctccgactggcgccccagctgcacaccatctccattcccctcactccaaagccctttctcctgagaatggagaaaattcaatgcttaatgttgaatgtaaaagtatccctgaggaaggaactgatcatttaagtatctttaggttaagagattaaagttgaatctgtgttagcaactggatctcagcacagaatgctttggaggtgtttttccaaagggcaccagcaacctgtgcctgaagcggttgatgttgcttgtcatacctttgccacatggcgggggggcagcaggggggggggaataagtagatgagtccttggaaggatggatgatggatgggtgggtgggtagaaggatggatgaatggatgagtggttggagaggtgggtgtatcaataggtagatggatgcgtggatggatggatgaggggatggatggataggtgggtagttagataaatggcatatggaagtatgaatggaagtggatatataggaagtataaatggatgactggagaattgatggatggatggatggatgaacagacgaatagttggatggcatacggaagtatgggtggatagatgaatggttggatggatggatgaatgaatgagtggataatgaatgggtggatggatggatggatgggtggatgaagggatgatggatggatggatgatggatggatgaatgtatggtagaggatggatgggcaggcaagtgggaaatgtgatctgtgcctcttaaagaactctcagtttgggacccagtttgtactctagaattgggggatttaactcaaacctggtttccccatcagacctgaggagagaatctgttgctttaagagccatcctcagaatacatgcccaggtccctgctcagctccaggcttcaggctttgtgactactcaggatcagaagctgcagcctccattaatcttccttggagtgagcgtcctcatggccaacctggacttccccagcagaggtggctcggtgccctcagtgacatcactgcatctccgtgtcagcctgctggggcttagcttggctttcattgccttggtttgcccggtattcctgcttcctcacacaagaagtgatagagaaaagagaaattccaaaaataaaatgctcataaaaggaggactccagaagagggtgccttccatctacttgaaaagagcaatctcccctctgctgtggctcctgagacctgcgatatgagctcagtgtttgagtgccatggtcccttagcagccagtgcctgcaggtttaggttcaaactagaatttcccaaggtttgaacaaggacctccaagtcctctgcaacattcagtacgtggggcaggatggaacaggagaagcagatgcagaagtgggtgtgggtggccctgagacagcaggagcctctttgtgctgggaaaaggatccagcagagggagggagaccgaggcagagagagacaggaccaccgatgggatgcagctgcaggggccagaggagggggcacaaaggggcctgctgggagtgtccagggtaggaaaagctctggaaaagtcactgaggagcactccttggctaaattcccatgctccacccatgcatctgaatcacattccactgtacagacagaccatgacaacttcatccattcatctgccgatggacacgggttgcttccagcttttggctattgtgaataacgctgctatggacatgaatgtacaaacatcccttcagatcctcctttcagttcttgtgggtacataccccgagtggaactgtggcatcatatggtaactctgtgtttaacattttgaggaaccaccctactgcttcccacagaggctgtaccagtttacttcccaccaacagtgcaaggattccaatttctccacatccgtgccaacactattttctttttgtcgctgttgtcattgtttgtctggaaaatagccatgctgaggggtgagaggtggtttctggttatgaatttgatttgcgtttccctgatggccagtgatggggcatcttcccctgtgcttggtggctcttcacactcttcctcccacgcacacaagactcctggactctggaccctccaggacagaagggtgggtaccagacgcccagcagggccagccttgctctctgccctcagacagggctcccctcaaggagaagctcttatccctcgccacacgccacactgtgttaagtctcctcccgcccactccacctcccgcccactctacctcctctggcatcttcctggataatcctctgtcccagggtgctggggtcacacgtgccctctgtttggcaggtcatctgtgggaagtgctccgagttcaaggccgagaacagccggcagagccgtgtctgcagagattgtttcctgacacagccagtggcccctgagagcacagaggtgggtgctcccagctcctgctcccctcctggtggcgcggcagagcctccagacacctgctcctgtgccccagcagctccagctgcctctgctttcggagtgtccctgggaccaggatagatgtgggtgtgtctcagtggggcccccaggctgggaacacactcggaagatcccgtgtgtgcacgctggcttctcgggaccagccagggccaaggcttgggaaccatttgcatccaggagttagatgggaacaagtgtcactcctggtcacctggttggagggcatggattgaagctgccctcaagtccaggccttgaggcccacctgaggggagatactgcccttctctctgcctgcctcacctccagctgtcagagggtgagcagggccctggaggcaggcaccccctcctcctcctccccgtccccttctcctcctcctccccgtccccttctcctcctcctccccgtccccttctcctcttcctctccctccttcctctccctccgcctcgctgtctttctccttctcctctccctcctcctcctgctccttctcctccccgtaccctttttctactcttccctctccttctcctcctcctttctctccctcctcctccccctccccttctcctcctctctttctcttcctcttttcctcctccactcctctttctgagagtagctgctgctttccctgccttccttcctcaagaatacagtctattctggggggttgcaggacagctgaaaaagaaaacgtgagtttccagaaaagcacatcgccctttctctccactcgacacagcctgcggtttgcagtgccagctgcacgttggagtctcctgggaagcttctagtgttgatctccctcctagaggctcagtgaggtgatcggggggtcagtgtgttttcagagtcccagctgctctgacttacagctgtggttggagccctgacctaggtccttggtctaagaagtcaaggatgtaagtctattaggactgagtgttgaatggtcttgatggtgaagaaggaccttgcactgcctaccgagctccctcatgcctgcaatttaaataccgaggtgtgttctgagagccccaggtccttggggcacgggcctccagggccctgtaaggtggactctggcctcgaaggggggcccaggtctgaggggtccagctctggcagggggtgtctaagccacgtccaaatggtggacagtagctccaacagtgacatgacagagggagggcctgtgtgtgtggtgtgtgtgtgtgtgctgtgtgtgcacgcacgtgcatgtatatggtgtgtgtagaactgacacgcttgaagtccctgtcccgtgacccaccctcaggtacttgctgttgggttttcctatgattttgatgtgtcctgacccagcatatggatgccctccccttggagggcccagcctgcaaaccccatctgataccacacatgcctatgtcctgcaggcttctagtgacccttgcaagccgggtgaggctggtcccagtctctgtgcagatcttggccatgtctccacagccagctccccccaagcagtggccctggccctaccccagcctcctcagaacaggggtgaccactgcaggggagactgcccctaacctgtgtctttgtgtccccagaagacacccactgcagacccccagcccagcctgctctgcggccccctgcggctgtcagagagcggtgagacctggagcgaggtgtgggccgccatccccatgtcagatccccaggtgctgcacctgcagggaggcagccaggtacgtgtccccaccccaccaggccctcaggccagcagcccagagcctcaggcctgaggcacccacagcaggcctgtgccaccagctggggtccacctgcttgagcagtgttacctggggcctcagtttccccagcagcgcaggattccctctgcttgccagtcacaggagacagaacctactggcacctgggtggaccccagagccagccagggtgcaaggaggggtgggccaagggggcacaaagggtggccaggagccacagaacctgtcaggggagactcaggaacccacacagccctggcccggccccttggagccccagttgctactctgtcacaggggctggcctgtcctgcctcgcctccccaggggccagacagcccaaagaaggccatggagtctgggggtctggtgaggtgggcaaggcatccccctccctatatctccctcgggaagaaccagtggatgcccccaccgaccgtcctcctgttgacaaaaggcagtgcaggcacagccaccagacccctcgggctcagcacctgccttgcgttgcaagggtctgggagtggcctcctgggagaggcccccatcactgaggtgagcccgaggccgggaagctgtggccccgctgaccatctgctcctctgctgcaggacggccggctgccccgcaccatccctctccccagctgcaaactgagtgtgccggaccctgaggagaggctggactcggggcatgtgtggaagctgcagtgggccaagcagtcctggtacctgagcgcctcctccgcagagctgcagcagcagtggctggaaaccctaagcactgctgcccatggggacacggcccaggacagcccgggggccctgcagcttcaggtccctatgggcgcagctgctccgtgagctgagtctcccactgccctgcacaccaccacattggacctgtgctgtcctgggaggtggtgttggaggccccatgaagagcgccctggactgctgagggtgggccaacagcccagagctcaggacatttggctttggggggaaggaaactgaggcccagagaggggcaaccactggccaagggtcacccagcaagttttggctaagagcctggcctccagccccagcagtgtggcccagagcaggggccgactgccaaagtaaccatcatccatatgggccgtgtggtgatgctggcccggaaggcagaaagaggcagcatgggcactgccagggacagccacatcctgctggtctgcagcgtggtccaccccgcctctgcccagcctgtctacaccgtgtgagctgaatcgtgacttgcttcccacctcctttctctgtcctctcctgaggttctgcctgcagcccccaggaggtgggcctgccccatcctagctggactcatggttcctaaataaccacgctcagaagctctgctaggacttaccccagccactgagtggcaggcgcatgagatttgtggctgttcctgatgctagtggcacacagtgcttatctgcataaataaacactggccaccagcagtgggcgcagcctcggtgatctctccccagcccctcagcagcgtccccccacaaggtgggctggctgataaagggttgagggacaagggtgatggaatcacatcggccacacaccacctggaaagcagttctgcatctgttgtcctgccagggggtgggcaggtggcaggtgaagatggccaggctcagagatggggagggtggggtgcagggcactcaagatggtgccagtggggaccttgcaaaggctacttggggtgggggtgctgtttgcatcagagccctgagggcctctgggagagagtgggggaatttagggaccagtgattgggggtgctcactggtcaggacccccgcccctctaatatccatatagcaccatgtggagacacctgggaagacaagcagggcacctacctgggggactgagagggcaggaggaagagccagaaatgggagactggtcacaggtgatgggggggacaggtgagatgagaacacaggtgaggcggagacagctgagatgggggcacaggtgagggcacaggtgagctcccacgagctctagctgggccacgcttgggatgctgctgcagccactgcacacggagcccctgctggctacctgggcctctgccacagcttcccatgctatgctggatgttctggtcccacttcacactaaggaaactgaggctcagggatgctaaacaacctgcatacttccacattggacagtgcccaccagggggagatggaatcagaccctttcagctgcacagcagcgtctcaatcggctccagctgctgcccaaggaagcagcaaagcccctcacccagctcaggctggagcagggacggggtggaggaggcctcgaggggaccccagcccgttggccctgccttctcccctgcagagctgagctctgacccacattcatcccctacagagcagtgccggagccgctccctcacacacgtctactaagcatcggctgcagccctaatgaggcccttctttgaagggtcaggactccgtcctctgcctgcttcagtagttctatttctgccatctcaccacaaccccaggaaatccccacttgacagctgaggaaactgagtcatagagaggccacccccagagccccacagctccggaaccgagcaggcacctggaattggcctgccggccatggtgaatccagcagggcaggtgtctgctggggccaaagactgtgctgtggggtcgccatggagagtcccctagcctcgagccctctctcttgcacccaccaacctggctagtccgctgggaggcagagacaaggtctgtcaccgcaggcctgggggcagggcgtgcccccagactctgccgcctgctgcgaggccagtgctgatgggagcttgtttgctgtcatactggtggctgtagtctgttcccactttttccaaaagaggaagctgaggctcagacaggggcagtgagaggcctccagcatgcagagcctgcgtgctgtgcccttacagagctggccttcctagggtctgttcccagagacccctcctgcgggacaccccagcaaggatgctgctggggagctggctgcctgggcctggcctctcgccacacactgccccgcccccagctccagccctcccatcccacagcccagggcctgggcacactccactgcccgtccatggagtggcagagcctggacacatgctggctggtcgcatgctggcttttggcctctttaccatcctccctcccctttctccccaaggccacccccctccagaggcataggagaccaccccctgggtggggggaagggaggcctgtggctgagtaggaggtggctcccggggtctcgggcctgaagaacgtcgaatggggcagcacagagtctggggtgtgggattaccacacctgggattaccatgggtgtcagggagggactgggctgggggcccttccgaggctcccctgcaccacagcctgcaggatgggggctcctggtaccagcctagggcctgaggttggagcacactggacaccagagcagaaaggctttcacaggtgcaagagcgggggcggggaggagagagcaaaccagggcggaggggagggagtgtgcttctgccatgggcaggttccccacccggcacaccccacctctctaggcccagagcagggtgctggctgcagcctggcagacctggagaagatgaatgagcctccaggagggcctgctgcaagcccagtactccccagctgcctgagaggagaattatgactgagaaggcgtcttggcaatagtgaaacagacccagagaaggaagtgcactttcccaaggtcatacagtgagttggggactgttcaggattccctcgttcacttttttttttttttttgagacggagtctcactctgtcacccagccttggagtgcagtggtgcgatctcagctcagtgcaccctccgcctcagcctcctgagtaattgggattacaggtgtgcaccaccacaccacacctagctaatttttgtatttttagtagagacggggtttcaccatgttggccaggctggtccggaactcctgacctcaggtgatctacccacttcagcctcccaaagtgctaggattacaggcatgaaccactgcgtccagcccctaatttacttttcttccgtttgctcatgcaccaggtgctgctagcagactctctgggggctcagcctgggccaccacataggggaggtgggcctcccaagtgtccatcccatagggaagcaagtgcactgagcatcatttggatttctgggacgggacaaaacaccacctgtagccccagccagagtcacactttcagccccatcaccaggctgcagctacctggccttcagaaccgccagcctcctttccccctggggccttggcacatgctgttccctgggcccgggggctcttcctgcagggctttgtgggccacctcctcaacgcttactgtgctcagacaccgcctctgcagacagccctccagcctttccacttttttgtttatccatttgctctcttgtttaacctctcttttcccacatagaatagaagctccgagagggcaggaagcagcccctttagcagtgcctggcccacagtaggtgctcagtgaatacctgtccatagccttggaaaggctcagtgactcctgccttgccataggggccctgagcactttgggtctggaatcctcattttatagatgggaaagtagaggctgcctgaggtcataaaggctcagtgctcccttgcctcactcaccatcctgggtctcggggacatcagagtcagctccttctcagatagttggtcctgttgtaaagatgggcacactaagacccagacaagcttccatgcccccaggacatgggcagagggagactgggatgcaggtcagtccaattcccgctgtgcctgcctcccaccgtcccacggaggcagcaggatctgcagtaggacagggcctctgaaaagccactagcccccacaagccccagcctaagagggcgacttaccccagaggccagagcccaggccttcgggtggtcccagccctgccctccctgcagccatgggggcctccagaactctgtcttatcaccagctgccccaggagcatctcccacttcccagaatccaagcccctctgagcagccagttctggcagtgagtgtgcaggaagaagggtgggctcacctcccctcggggttgcttgctctgtttctgccaacaaactccctctggacgatccctccagggacatccagggagagctttgggcccagccggtgcctgggggtggctgcatcatgaccccacagcccattccttcaggcacccaccccaagacaccgtactttctgggcctcagtaggcagggccagcggcggttggctctgaagctgaaacactatgtccatgcaggcagcgcctggcactgggcaggtatggtccaggcccctccacccttcccctcaggacctccctctcgcgccagattgaagcagtcatggttccccaggggcacctggtggtccctgcagcagctggctgcgacaagaggccaggctgctccctgcccacaacatcattcacatcgttactatgggtgaaggattcctctccatttactggggagaaaactgaggttggggaaagggagccactggaagccacgggctccagtgtacctccagtctacctccagggttcctccctcagttccagggttgttagataaacctggaggtctgggtgggccaaaaagggaggcagggcaggccgtcggggagcagccaggcccgcaccccacattctatacattctatcctggaaagcagccgcttgggccgcccagccccagggcctaccctgctctcctcacactgccttggtggatttctgggcttggtgccctgctcctaggtgggaagctctgacagaggctcccacaagcctccagaaggctgcagcttagccaggatgacaactgtgtggtcggacagcagctacatgccatctcccagctgtcaggctccatggcccttgaaccccttgtgtactaaggccccttccagctgggccacaggaggtgcaggccttagtgctgccttggacgtgagtgttcccggggtccctgacggcagcagcctgcccacttccacgcgtctgtccttgctcccttggggcctcctcccaccctggttgacggatgcccagtactggccccaggctggactcaaccctccctgtctagccagggtggggcaaacacaaggctgtgccctggaggcttggggacagcaatgggtatcatcacctaagagagaaagagctagaggctgggtgtgtgtcagctgagccccgaatttctggaaagtcaaggtgtttcaggaagcagactccacctcttgggatcccgtgacttgacccaagccaatcagcatcctcattcccttggccacagtgattggtctgcatggtcacatgacccaagatggcctccccaccccttgatggcaggagggagcctggctgctgagcttgggcagccatcttggaactggaagagcctcccaatgaggcccaaacagaggttggaggaagtcagatctctggtttcatctagagtagttacatgagtcaataaatttcacgtggagtcaggttttctgccaactgctgtccttgtccacccagccactgtgttgcagggatcagcctctgctctccaaaattcctgccttggccatatttcccccacccagcatccaggcttatagcatctcttcctcttttctgccggggccaggcctggcccccttggagagctcagtcttcagtgccccagtgctgtccactataaattctacacaaaacttcctcatgaatctccatctcagaaaggaagcttggctttccctttaccttatcaaaactcacgtaaattattcacccccagccaggcatggtggctcacgcctgtaatcccagcactttgggaggccaaggcaggcggatcacctgaggtcaggagtttgagaccagcctggccaacgtggtgaaatctcatctctactaaaaacacaaaaacatcatccaggcgtggtggtggatgcctataatcccagctactcaggaggccgaggcaggagaattgcttgaacacaggaggtggaggttgcagtgagccgagattgcaccactgcactccagtctgggcaacaaagcaagactccatctcagaaaaaaaaaaaaaaaagatccaccccttccaacaacatctgtcccaaagagacattgaaaaactgctgacacctgaatagcccattcacatttaagaaaaatcatggccgggtgcggtggctcacgcctgtaaagcactttgggaggccaaggcaggcggatcatgaggtcaagaaatcaacaccattctggccaacatggtgaaacaacctcatctctactaaaaatacaaaaattagctgggtatgatggcatgcgcctgtagtcccagctactcaagaggctgaggcaggagaatcacttgaacctgggaggcagaggttgcagttagccgagatcacaccactgcactccagcctggcgacagagtaagactccgtctcaaaaaaaaaaaaaaacaaacaaaaaaaaaaaaacaagaaaagaaaaattatattggggtatagtctcaaagcacccctcttcccggagtcatgaaatgaatattttgctctgtgagacaacaggattctctcctctgccctcaacaaaacctcacaggaaagggctactgccctcacctgcatggagagaaggaccgtgcagctcagcatggggaggccatgccttaggcgtgttctcctagtagcaggccctgctatgtagatttcaatgcaaggagtttatttgggaagtgatctaggaaaccgaataggggagtggagattgaggcagagaaaggctgaaagcctttcaaggtacagtgtgttgaataatgtcacctccaaattcatgtccatccagaacctcagcacatggcctgatttggaaataagatgcaattcattaaattaagatgaggtcactgtttgtgacttaagtgaggcatttaggttaggttcggtttagtcagtgggggacctcagaccaaaatggcaaaaggattgagtttctaattcacaaagcccagggagcagagggcagcatggttcacaaggcccatgggaaggggaggggacgtctgggacatatgtgctcagcagcaggtaaggagaaaaagagagggatctgggggccaaagtctttactggggtccagggtgttacctacgtgcgtttcccgagtcaggggctcattggttgatttaaagggagtgtgagggtaagcactggaacttggctacactgtcaagttcaccagacttaaagcagaagtaaggtgac

SEQ ID NO: 1648 - DNA, 2695 bp, Homo sapiens
gaggatggtggttgtgggtcctctgtgagcagccctgttaacctttaaaccagcacggccgccgcagctgtgagcctagcacctgatcagtggagagctgtggattgcatgtttgtttgccattgcccccgccaccctgcaagttgcaccttctagaatcagcaagccaagctcctctcacccagcgtaatgatgcggaaatgcaaatgcaccatcatgttgtgacccatattgcgaaaattagaaaaaaggaagttgtgtttcgctattgcacgaagttcagcccagaggagaaactcgctcgccttcagaagacagtacctcctaaatggctctactttgaacctgctgggcaaggaagagattttcaaggaaaccatctaccgtgtgcaagctcctgccggccaaccccagaccccagcacggagccaggcgcctgtgcccgccaaccctcagcatcctcctcagaaaggctggtggcatcaggaagcccctggccagcctccacctgagcccagtgagctcagctttaaggatggagtcaggcagggggtcctcaacccctccaggacccattgctgccctagggatgccagacactgggcctggcagttcctccctagggaagcttcaggcgctccctgttgggcccagagcccactgtggggaccctgtcagcctggctgcagcaggggacggctctccagacataggccccacgggagagctgagtggtagcttaaagatccccaaccgggacagcgggatcgacagtccatcctccagtgtggctggagagaactttccctgcgaggagggcttggaggctggcccaagccccactgtactgggggcgcacgcagagatggccctggacagccaggtcccgaaggtcaccccccaggaggaggcggacagcgacgtgggtgaggaacctgactctgagaacaccccccagaaggctgacaaggatgccggcctggcccagcactctggcccccagaagcttctccacattgcccaggagctcctgcacaccgaggagacctatgtgaagcggctgcacctgctggaccaggttttctgcaccaggctgacggatgcggggatccctccagaagtcatcatgggcatattctctaacatctcctccatccaccgcttccacgggcagttcctgctgccggagctgaagacgcggatcacggaggagtgggacacaaacccacggctcggggacatcctgcagaagctggccccattcctgaagatgtacggcgagtatgtcaagaactttgaccgagccgtagggctggtgagcacgtggacccagcgctccccactgtttaaagacgtcgtccacagcatccagaagcaggaggtatgcgggaacctgacgctgcagcaccacatgctggagcccgtgcagagggtcccccggtacgagctgctgctcaaggactatctgaagaggctcccgcaggacgccccagaccggaaggatgcggagaggtccttggagctcatctccacagccgccaaccactccaatgctgccattcggaaagtggagaaaatgcacaagctcttggaggtgtacgagcagctgggtggggaagaagacattgtcaacccggccaatgaactgatcaaggagggccaaatccagaaactgtcagccaagaacggcaccccccaggaccgccacctcttcctgttcaacagcatgatcctttactgtgtgcccaagctgcggctcatgggccagaagttcagcgtccgggagaagatggacatctcaggcctccaggtgcaggatatcgtcaagccaaacacagcacatacattcatcataacgggaagaaaaaggtccctggagctgcagacgcggacagaggaagagaagaaagaatggattcagatcatccaggccaccatcgagaagcacaaacagaacagcgaaaccttcaaggcttttggtggcgcctttagccaggatgaggaccccagcctctctccagacatgcctatcacgagcaccagccctgtggagcctgtggtgaccaccgaaggcagttcgggtgcagcagggctcgagcccagaaaactatcctctaagaccagacgtgacaaggagaagcagagctgtaagagctgtggtgagaccttcaactccatcaccaagaggaggcatcactgcaagctgtgtggggcggtcatctgtgggaagtgctccgagttcaaggccgagaacagccggcagagccgtgtctgcagagattgtttcctgacacagccagtggcccctgagagcacagaggtgggtgctcccagctcctgctcccctcctggtggcgcggcagagcctccagacacctgctcctgtgccccagcagctccagctgcctctgctttcggagtgtccctgggaccaggatagatgtgggtgtgtctcagtggggcccccaggctgggaacacactcggaagatcccgtgtgtgcacgctggcttctcgggaccagccagggccaaggcttgggaaccatttgcatccaggagttagatgggaacaagtgtcactcctggtcacctggttggagggcatggattgaagctgccctcaagtccaggccttgaggcccacctgaggggagatactgcccttctctctgcctgcctcacctccagctgtca

SEQ ID NO: 1649 - protein, 634 aa, Homo sapiens
MESGRGSSTPPGPIAALGMPDTGPGSSSLGKLQALPVGPRAHCGDPVSLAAAGDGSPDIGPTGELSGSLKIPNRDSGIDSPSSSVAGENFPCEEGLEAGPSPTVLGAHAEMALDSQVPKVTPQEEADSDVGEEPDSENTPQKADKDAGLAQHSGPQKLLHIAQELLHTEETYVKRLHLLDQVFCTRLTDAGIPPEVIMGIFSNISSIHRFHGQFLLPELKTRITEEWDTNPRLGDILQKLAPFLKMYGEYVKNFDRAVGLVSTWTQRSPLFKDVVHSIQKQEVCGNLTLQHHMLEPVQRVPRYELLLKDYLKRLPQDAPDRKDAERSLELISTAANHSNAAIRKVEKMHKLLEVYEQLGGEEDIVNPANELIKEGQIQKLSAKNGTPQDRHLFLFNSMILYCVPKLRLMGQKFSVREKMDISGLQVQDIVKPNTAHTFIITGRKRSLELQTRTEEEKKEWIQIIQATIEKHKQNSETFKAFGGAFSQDEDPSLSPDMPITSTSPVEPVVTTEGSSGAAGLEPRKLSSKTRRDKEKQSCKSCGETFNSITKRRHHCKLCGAVICGKCSEFKAENSRQSRVCRDCFLTQPVAPESTEVGAPSSCSPPGGAAEPPDTCSCAPAAPAASAFGVSLGPG

SEQ ID NO: 1650 - DNA, 2656 bp, Homo sapiens
tgcctgtgggtgccgcggaccttcggggcgggccagggaggcgggaccgctcctcagaaccccaggggcttcagtcctgggctgattggcgcgggaagcacagcccggccctccaggtccccaaggagaccccagcctcctgctgcccactgtgagcgacctccccggggctcctctggaagcggctccggcaagtatcgagtttgcctgtgcggagctgggggagcctccggctttcctgtttgctttgttaattattttcgtccccagaggaaggcgtacctcctaaatggctctactttgaacctgctgggcaaggaagagattttcaaggaaaccatctaccgtgtgcaagctcctgccggccaaccccagaccccagcacggagccaggcgcctgtgcccgccaaccctcagcatcctcctcagaaaggctggtggcatcaggaagcccctggccagcctccacctgagcccagtgagctcagctttaaggatggagtcaggcagggggtcctcaacccctccaggacccattgctgccctagggatgccagacactgggcctggcagttcctccctagggaagcttcaggcgctccctgttgggcccagagcccactgtggggaccctgtcagcctggctgcagcaggggacggctctccagacataggccccacgggagagctgagtggtagcttaaagatccccaaccgggacagcgggatcgacagtccatcctccagtgtggctggagagaactttccctgcgaggagggcttggaggctggcccaagccccactgtactgggggcgcacgcagagatggccctggacagccaggtcccgaaggtcaccccccaggaggaggcggacagcgacgtgggtgaggaacctgactctgagaacaccccccagaaggctgacaaggatgccggcctggcccagcactctggcccccagaagcttctccacattgcccaggagctcctgcacaccgaggagacctatgtgaagcggctgcacctgctggaccaggttttctgcaccaggctgacggatgcggggatccctccagaagtcatcatgggcatattctctaacatctcctccatccaccgcttccacgggcagttcctgctgccggagctgaagacgcggatcacggaggagtgggacacaaacccacggctcggggacatcctgcagaagctggccccattcctgaagatgtacggcgagtatgtcaagaactttgaccgagccgtagggctggtgagcacgtggacccagcgctccccactgtttaaagacgtcgtccacagcatccagaagcaggaggtatgcgggaacctgacgctgcagcaccacatgctggagcccgtgcagagggtcccccggtacgagctgctgctcaaggactatctgaagaggctcccgcaggacgccccagaccggaaggatgcggagaggtccttggagctcatctccacagccgccaaccactccaatgctgccattcggaaagtggagaaaatgcacaagctcttggaggtgtacgagcagctgggtggggaagaagacattgtcaacccggccaatgaactgatcaaggagggccaaatccagaaactgtcagccaagaacggcaccccccaggaccgccacctcttcctgttcaacagcatgatcctttactgtgtgcccaagctgcggctcatgggccagaagttcagcgtccgggagaagatggacatctcaggcctccaggtgcaggatatcgtcaagccaaacacagcacatacattcatcataacgggaagaaaaaggtccctggagctgcagacgcggacagaggaagagaagaaagaatggattcagatcatccaggccaccatcgagaagcacaaacagaacagcgaaaccttcaaggcttttggtggcgcctttagccaggatgaggaccccagcctctctccagacatgcctatcacgagcaccagccctgtggagcctgtggtgaccaccgaaggcagttcgggtgcagcagggctcgagcccagaaaactatcctctaagaccagacgtgacaaggagaagcagagctgtaagagctgtggtgagaccttcaactccatcaccaagaggaggcatcactgcaagctgtgtggggcggtcatctgtgggaagtgctccgagttcaaggccgagaacagccggcagagccgtgtctgcagagattgtttcctgacacagccagtggcccctgagagcacagaggtgggtgctcccagctcctgctcccctcctggtggcgcggcagagcctccagacacctgctcctgtgccccagcagctccagctgcctctgctttcggagtgtccctgggaccaggatagatgtgggtgtgtctcagtggggcccccaggctgggaacacactcggaagatcccgtgtgtgcacgctggcttctcgggaccagccagggccaaggcttgggaaccatttgcatccaggagttagatgggaacaagtgtcactcctggtcacctggttggagggcatggattgaagctgccctcaagtccaggccttgaggcccacctgaggggagatactgcccttctctctgcctgcctcacctccagctgtca

SEQ ID NO: 1651 - protein, 634 aa, Homo sapiens; identical to SEQ ID NO: 1649

SEQ ID NO: 1652 - DNA, 47338 bp, Mus musculus
  misc_feature (1)...(47338): n = A,T,C or G
gaagccaagtacagtggagggtacagaaaggaagatgtcagaaaccatgccaacaacagacaataacagctccttatgattccatggaggtttccactgagatcaatggtgctctgtaggcagtcacccaagccctgccagcctggggatgttttcagagactgtgccaatgaggaagtgtaaggacatggtgtgtcattgggaaaagggcctggagctgatactgcagggtcatcagagccttgatcatcagactaagtccaggatgaaatgggcattgggtgatcctgcctgttttcatgtgatctcttttatcaacttatgattttatctgtatcgtgaatcatcaaagtgactgtttccacagtagctctgtgttagctctaggttgtagactagtgagggcaacatccccattgctcccttatgctgatgggcgatggttggcctagtgaccttcatgaagggcttctctgtatttcccatataccctggatcacttctgatgatgttcttgttctagcaagacagcctcagcacatagatttatgagtatgtgaactggaagagaaccttaacttctcagttttatgttccaggaaggtggtatgtggacagccagcccaaactcttggatgagtatggaaggaaccacctttggcatttaggaatatgctcttggaactggcgctcattgtctttatttgtaattctaaatctattccccactcttctctatatgatccaggtcagggaatatgacctatagaatagcagcaagggtgctcttgatctgaggatgttggttggtttatctgttgtacaacctcagagaaatggggaaatgagggatgggaacatttttctgataccccaggattacaggagctagccacttccctctgcctacatttctactgctgacattaacctccttgaccttggcctctttggatatggattctggtaaagtttaggcctgatagtagcaatgaccttgtgcacagctgtgctagctctggggtaatgtaatatctacaatgtctttacctatccatagctttgccaatggtttctttgtgcaattttcctgaaatcatcttaacttctgttgttttgttcttggtttttcaagacagggtttctcggtatagccctggctgtcctggaactcactctgtagaccaggctggccttgaactcagaaatctgcctgtctctgcctcccaagtgctaggattaaaggcgtgtgccaccatcgctcgcccaacttctgtactcctgttctttcccatgtagattctgactcatgaattcctgaactataaaaaaaattaagaagcaatgctatcacatggcttgtttaggatttaataccacaatgatggcagcaatggggtcaataagtggtagctgaagaagtgtcttatagtggtgtttgattcccacaatttagcccttccaatattcactaagcaccccccacaccccagtgtttataaggtgcagagatggacattttctaggtaatgaaaatgctgtagtgagttgaacatgggtcataacacttgcagcaatgtctttatctttctcccaccttttccctcatactcaaatatcatttgacaaatatttattagggcttatcaaatttttggtggcatcctgttaatacctggggatgaaacattggacaaaatacacatgcccctgattttggagcataagcaggctactgggaagaggagaggtgtctataattatctctcacactcatcatagagtggtggaaggtctccagatgaacacctattctgtaggacataatgcttgtcctggaccagggtcaggaactactctcctaagaaggcaatgctaaataagatggaagaaggagtactaatgaagccaggcagagactcatgcaccaagtccatgtgctgaagtggctggagtagagaagtttgacaacaactctgagccatatggcgtaggttctgcagtcagggatagcattagaatctgaatttaaaaccaagggtaaccttgatggtacacatttgtaatcccagaacttgagagattgatgcatgaagtttgggagtttgggtccagactgaatgccatagtgaactctgtctcaacaaacatacaaatatacaaacaatatcctgaagaaacctatcaggagggcactccatgatggttttaagggttgaaggaatcactggacagtaataaagagtgtggactggagggtcagaggatgcagatgcaaagaccataggccttggccatagtctgggtgaaagaagacagcctgtgatgaactggtactagagaacatgaggagacctgtaacaatataaaggatactaggaaaacagaatgaacaagaaagttaggattggatgtagaggataaaggattgaggtatctaacgaagacctaggttgttggctatggatgagagcatcaggctagaggtggagtattgggtgatggtttagtttggtgtgcagtatgtggagatcaattacagtttttagttgatgtgccctttgagacaactagattgaatatagcaagaagcaattggacacagagctctgtatctctggggataggactgaattgatgttgggaatagttagtagaaaccattttgtcattaaaatccaaagccagccctgacaggctgcctgtggagagagtctgtggagaattccagaggggtacaaggcaaactagaagcgtgggtggcaaagagaccaagagaatgttgtaagtgaagggagtagtcgacaatgtctagagttcttgagaagccaagaagagaactgaaaaatcgctgcttgatttagcaacatggaggcctcagtaagcctggtaggaataatttcaatgatacatggtgacatggagtcattctagggaatacagtgatttcacatctttggattcctccatcactttctcggttgatttgatgataaatgacagctgaagaaaggggaaaagaccaagggagggttatattggtcagccttttttttttcttttttttttaagatttattttattttaaactgtgagtgagtgagagagagagagagagagagagagagagtgtgtgtgtgtgtgtgtgcgtgttgtgttttataaaaaagaaaaagaagcctgagatatgtttggtggaggcaaggtatggcatgggggaagggggtgcctctgcaagcccatgctgaggcatcccttctccctgaggaatcagagtttatttagggcatggggagggaagtttatggagtagtcgagacagagaaaggcagagggggagagagaggggaatagagaccggtggaaagagagggggaggggagtagagatagaaggggaagagagcaatagaagagaagagaacaagagagagaggagggggcaagcagccccttttatagtgagtcaggctcacctggcttttgccaggtaactgtggagcagaacttagaagaaatgccaacattgtgagtgtgagcgtgtgtgtgtgtgtgtgtgtgtgtgtgtgtgtgtgtgtgtgtgtgagagagagagagagagagagagagagagagagagagagagagagagagagaaagagagagagattgaggggtgtgcagatgtacaaggtcaacatctggtgttctcattactccccaccttaattttgagacaggatctctcaggaaacatgcgtctcatcagttcacctgtcagatgaaataaaccctcttttgcttttggtcagtgttttaaacagtaacagggaagcaaaccaggatacctgccaaagactcaatcccacagagccatacacaaatacacagaataatggtaataacaaggctgagtttcaacgtgaagaggctcctaaaattactcctgggtagagaatgcccaggcttcttcctttggttgttgttctttgtttctctttctttaaagaattaggggaaaaaaatagtttcacagtggttatgttaattggaaacaacaacatggaacttaggcagaacagaaaaagacttacatgtctgaaactctggtttgaagaaagtcccattgtctactagggaagaggagggggatgggatagaagtgtgtgtgggggggtgggatttggggagacaatggggtgaatgtgatcaaaggtgtctgcatgtataaaaatgccacaatgaggcccattatgctgtgcaattaatatgcactataaaaaaaaagtcccactgttttctggtcacaagagccttcagtgagatccatgtggggactgtatcctcgtctgcaaaccagctgagatgagctgcagaacacccagcaggctcttctttccttgggacttagacctcaagaagaaggccgaaaaatcctggagatatccagagactgaggcagcagcagccccctaagagtggagagttagacctcctgagacttgtcagggtttctcttgggactggggaaggccagggcagagaaacctggactctgagatcctggagaacagacaggctaagcacgtgcactcaagttggcccgtctgagtgtcaaggtccaccccactcagctgtgtgaaccggagaaagttactgagtttctctaaaccacagcttccccgtttgtggaaggggaataaattctgattgcacctcatcacaggactggggtgggacagaatgagagaattcatctgaaaaaaaaaaaatcttagccagacatgcaataagcactcaagacattttgaatgatggttacataactcctctttattttacagatgacaaaacttggcccaaagaagcaagctgatattcctaaggtggtctggtttgtaggagagtgaggcctgtatcctcgcacccctcctctgtaccatcggtgataaagatgcagtatgttacagacagaaagcaaagccaaattctgggctcaaatcccaactcttccactgtctgatgataagcagaagaggaaatctatttatttattcatgtgtttatttagtgtgctagggatagaatctaggactgcatgaatacttgcatgctagataagcactcggtcacttagcagtgcgcccctggcccaaggatgccagggactagccttggcttggagaggggttctgagagaaggggtgttttggagtgataaaacaaacaactagaagtcaaattgtgcatccaagctgacagcctccgttctgcttgagatagctccctagatagatctcagtagataggttatgctttgtagtctgttcgagacatctttctgcttgaggcatcatctctctctctcaagacagttctctctgcttgagataactctcttactagaaaaaaaatgtttctaaaagctctctggtagttcatggattttccaaccaaaatcagaaaagctgctacaaaaaaagttcttggattttctagaaaaaattctaaaagagctatgttcatgctccagagatgtctagccagctcagctattaaaaacaatgaattcataaaattcttagacaaatggatgcatctggaggatatcatcctaagtgaggtaacccaatcacaaaagaacacacatgatatgcactcactggtaagtggatattagcccagaagctcagaatacccaagatacagtttgcaaaacacatgaaactcaagaaaaaggaagaccaaagtgtggacacttcgatccttcttagaagggggaacaaaatacccatagaaggaattacagagacaaagttcagagcagagactgaaggcatgaccatccagaaactgctccacctggggatccatcccataaacaaccaccaaacccagacactattgcagatgccaacaagagcctgctgacaggagcctgatgtccctttctcctgagaggatctgccagtgcctgactaatacagaagtggatgctcacagtcatccattagacagagcactgggtccccaatgaaggagttagagaaagtacccaaggagctgaaagggtctgtagccccctaggaggaacaacaatatgaactaaccagtaaccccagagctccctgggattaaaccaccaatcaaagaaaacacacaaagagactcatggttctagctgtataggtagctgaggatggcccagtcgatcatcaatgggaggagaggcccttggtcttgtgaaggaaggttctatgccccagtataggggactgcctgggccaggaagcgggagtgggtgggttgggaagcagggggagtgaggagaggatagggtattttcagaggggaaactaggaaagggcttaacatttgaaatgtaaataaaggaaatatctaatttttaaaaatctaaaaaataactgctatccctctctgctaactcatcttattcagaccaaaagcccactcttttatttacatatcaatttagttattccaggttccctcttgaccatcccatgaaccagcattccatggccttagcctcttgactcttaggaaagggacagcaagtacattttgtctttaaagaatcatttattttatgtatgtgagtacactgtagctgtcttcagacacatcagaacagggcatcagatcccattacagagggttgtgagctactatgtgggtgctgggaattgaactcaggacctctggaagagcagtcaatgctcttaaccactgagccatctctccagcccccaagtacatttttttttaacattgcaaaataattcagagatctacctacctttgtaaatttagctgggtgggatcctgtcttgagattaccattctgaccatgcctggacctaaattcaccttttccaacactgaccttgaactcagaaatctgtctgcctttgtaagcacaaacaaaaaacttagctggatgggctcttgtcctgtgatcaccactccctaaatctttttatctccttccttagtatttttctgacaagctggctcatggtgcagctgcctctgttcctttagatctgtgaagcttgttgtacagttcatattgcatccttatattttgcctagttgagagattatgtattttcaaactcatgttttcagcgttctttcccacagccttaaggtctgccctgaaggtcacagtgttctaccattttgctgagacatagacattccctctcttcctagactcatgctgtctctgattatcatatcgttattaactttggcagagaggaccttccttgaaggaggaacatgaaaacatgtacattattatacaaacaagacttacacccacagctaccatcaatacttgtggagacccaggctggctccatttaatccctcacatggtcaagcaggactcagcagagggtcacctgtttaaagtttagattcctccactgtgttatgggcaaacttatgttgttgcagagcctgagatgaaaagctgtaaggctacctatttgaacctagcaaatgacatttctctgcctccctttctaaattgtcctcttgcctctctctctaagtcaggctttcagaaccattatgtgtaagaagtccacaggcaagccttcagccctttagtgaagtgctcatgatcttacaagatggttcagtacgcaaagatgcctaccatcaagcctgacaacttgaattgatctctgggttcttcaaggtggtaggagaggactgactcccgaagttgtcttctgacctacacacacatacacacatcatagcatgcgtttttacgtacatgtacacacaataaataaactaaaataaataggaagtacttatgatcctctgtactggtctttggttcaggaccttaggagagttgtccaagctcaacagatacaggctcacagtcatagagaatgtaagagagtgcatgcggagccttgagaaaagtagctggagcctgggggagcttggagaagtaggacttaggctgaaatgtggagagggtccctgctgcaatctgggagaagctgagttgctggagccgtctggcaatgcctgtggccatgcatgtaatttcatggggaaagagtatcatatgagaatatgaagagcataggacagccacaaggtacagacagccaggcctctctgttggtgatgacaatgagtgttgcaggtaccacccagttcctcaagaacaacaacttctatagcttctgggactgctgggttaaacagtgctgaaggcagagactgtcacccctcctgtgtcaggttccctcccagggcagcccccagaggatgacatgtgaacctggtatgtagcatcttgactaccccagtgaagccagcttagatccctgagggccatctcagcctcagggatctctgtggactttgttgagctcattattgctactgtattatggctcagcatcctccatcccaccctggtgtgaccatcagactgttcaatattgtctttttcagggaggagagggtcatttcttaagaaaatgagtcactggagcacagggtggggcaggtaggtgaagaagaggaatttgagaaaaagggggtggcagtggagggcatgccaagaggcagtgtgcccagagagggtgatcctggaagagagtgccaaggagcagtgggcccagggcagggccggaagcttcaagccagtttggtagcaatctttgtacatcagacagggaacacaaacaggctagatggaaggcacgctgctagctctcccagcttcagctcttgaccttctgcagtctgttccttcatcatgtagaacagagcaagtcatagctttccagcttaaaaccctccagaggttcttccagcactgtgaatagaacccacaagtgttttgctatggtttgtgagatctgtcataatatcatccttctctctcttttctcctttctttcctggtgtctgtgtggctgtcgggtacacatgtgagccttgggcgctgttccttgggcactgtctaccttgttttgagagatggtctctgataagcttggtgctagctgattgcactagcctggctggctaaccagtcccacagacaagtccactctggctcttctcttgcgtccttcagctttttgctcaaatattattttcccagtgaacttttccctgacaccccagtttactcttcccagcattctctatttatctttctcttttcatgattctctatgccaaagtggctcctgtagcaaactgatccatggtatgtttttgtttctttttgttacttgtcaatcttacactcaagaagggcaggagtttgtactccttgggctctgacctcaaagaaagccggtgtcctggtgcacagtacctgctcagtaattaattgttctacaaatcagcctatgacttgtgacagctagaacaggcacgggtaaggacgctggctgcggaacagcctgacttcagagaatagctgtttgtgtctgcattagttttctctgcggaagacacttagaaactaaggttcccaacagttctccaactctagaaactgggaggaggcaacaattaaggattcagagtggatgtggatgggagaatccatttcccaggagatgggtcagaagagacagtgatggttcaggaagagcagtgggtagggatcgaaaccaagccacctcaggctcaagtgcggctttccctgaactatttactcaacctccctgaatttgctttgtattttaagcaggtgggtgggtgggacgggggaagggttatgggaggaggagtccatcatgccttcctctctggcaggttatagcgggcattagaggagataaccatgcaggtagcccagaggcaaggtgggcggtggggcaacagaggaggaagtagcgttgtcagcttggcatctaggggagggtgcatggaacggagggagggagaggctaggaggaccttggccagcgggcagaatggcagttggtagaggaagggagcaagggggtgtttcctgggacaggggggcggagacctggagactataggctcccccaggactcaagttcattgagtttctgcagacactgaacggctttcagtcttcccgctgtgactatcacctgtgggctccacctgcctgcacctttagtcagcacctttagccagcacctgcgccagaccccagcaatggcgaaccatgcgcccttcgaaacggatatcagcaccctgacccgcttcgtcatggagcagggcaggaaggctcagggcacgggggagttgacccagctgctgaattcgctctgcaccgcgatcaaagccatctcgtctgcggtgcgccaggcgggcatcgcacagctgtgagttaggcctctggctgccgcatcttatccgttagaacgactggggtctgcttctctggacccctgctgggtcctgatgggtctggttgccagtgtcgcatctgacagttaagattctgctctgctgcacacagccctcgttcccttctcctggtgcacaattgccggatctcttctggtctcaactctccttttcgctcctcccagattcctggtataagtgagtgacttaccagctgcccacccgggactctctaaagtgccaatacctgcgcctttctccccatttctcttttaacctctgttactctccttggaaattgaaatcccaaattcagcttctaattcagtatcatccctaacctagacaagccccataaagagtatcccaccacttatcagtctggaagggagccgccacacagtattccgggcgctccctctttctggagccagctgtagactcacctcctgagcaccaaaatctctccctgtttgcattaatgctaggagcagatcttgcccaattattaagagcttaaagacagagcagaagtagtagactgcttttgataaagccaagaatccaatctccttcccctgaaccatctggggactttgttatgcagaccctccttcccgctgaataagaaaagttccctgtggtagatgatggtgatgatgataagggggaggaggaggaagaagatgaagaagaagtttatgtatttattgagacatggtctcactatgtaggtccactaggtgttaaggttagggttagaaacaggttctcacgatgtagcttctactgtcctggaactcactgtgagtagaccaagttggccttgaactcaggggttatctacctgcctctgcctcctgagtggggattcaaggcatggtgggtgattttaatgctatggtccatattttgtactgtaggtaggagcaaatgaagaaacatggagtctcagaacaccttcattttttaaactacacaacacttctgtactttgttctggcctgagcaacatgtttgggacctaactggttttcacacaactgaatggaacctgggttttcaggttatcggtatactttcttaacaaatatcatacttaaaaaaatttttttcctacgagcaatgagagactgatatgtgagatttgtagctaacttgaacatataatcctttgaaatggatttttaaatgctcctccaacagtgtggcctgtgttagctatgtgtgcatttatttctgaaaaactctggttctgctgtgaggcttggtggataatccttaagcgtaaaacacctggtgatgtttactttagatgccaagcaaggctaagccttactagagaaagctagggacatgtatattagaagtgatgactccctcactgtttcgctgtgttcttagccctaaggagcctttcagccagcacactcaggtaaaagtctcacttcaaattaaatttacagctcaaggatttagctctctcagaacctgggggttttgtgagagacgacagttgccatttcttacattattctaaaaatgcactggtacttgccacaaccccagagagacctagggttaggttaatcaccctcaagatatctcactttttaactcacatctcagacaatggtaacggggttaggggtagaaggtgctaagtttggaacagaagagaatgtgtactaatagactagatggtcacagcatcagctttgaaaaggtcgtcccagattccttaaggccctgcacctattcacaaaaacaccaagccattcaaaggataataaggaaaacgacccccctgccccaccacacacacacacacacacacacacacacacacacacaccaaattgactgttaatttttcttggttattttcccaggcccgttttttatgctcacacaaatgtgtacatgaacgtgcatttacacattcctctgtagctagcaaataaaatgggactatacttgccgtgtttttctccagctatataatgaacattctctgccaccaggatgtgacaatccaccacctcctattaacttgctgcagacatctcatgagaaatggagcccttctgtagcttgagtgcattaagtccccactactagggctattacagtggtagaacaggtgttgatgctggctgagggaagaagttggattctgtgggacaggaagcgtctgactattcacaggacgataagcagtcagaccactagcaggcagatgagatctcaaagacagagctttcaattaggctcacttgggctttgatgtgttggatggagagccagtgtgcccataataaagagcttattaaggctgccagttggccttagaagagcactcacccagagggatgggatggttgaagatctgcaagaaccccaccaagactggtttcagcccgttgtctcacagggaaatcagcagaggtataattatgggtcactatgctcctctgcctccgtcaacctcaaagtcgccactgtagtcatttccactgctccatatgatgtgacattatatgatatatgatatatagcatatgattgatataatgatataacannnnnnnnnnnnnnnnnnnnnnnnnnnnnnnnnnnnnnnnnnnnnnnnnnnnnnnnnnnnnnnnnnnnnnnnnnnnnnnnnnnnnnnnnnnnnnnnnnnnnnnnnnnnnnnnnnnnnnnnnnnnnnnnnnnnnnnnnnnnnnnnnnnnnnnnnnnnnnnnnnnnnnnnnnnnnnnnnnnnnnnnnnnnnnnnnnnnnnnnnnnnnnnnnnnnnnnnnnnnnnnnnnnnnnnnnnnnnnnnnnnnnnnnnnnnnnnnnnnnnnnnnnnnnnnnnnnnnnnnnnnnnnnnnnnnnnnnnnnnnnnnnnnnnnnnnnnnnnnnnnnnnnnnnnnnnnnnnnnnnnnnnnnnnnnnnnnnnnnnnnnnnnnnnnnnnnnnnnnnnnnnnnnnnnnnnnnnnnnnnnnnnnnnnnnnnnnnnnnnnnnnnnnnnnnnnnnnnnnnnnnnnnnnnnnnnnnnnnnnnnnnnnnnnnnnnnnnnnnnnnnnnnnnnnnnnnnnnnnnnnnnnnnnnnnnnnnnnnnnnnnnnnnnnnnnnnnnnnnnnnnnnnnnnnnnnnnnnnnnnnnnnnnnnnnnnnnnnnnnnnnnnnnnnnnnnnnnnnnnnnnnnnnnnnnnnnnnnnnnnnnnnnnnnnnnnnnnnnnnnnnnnnnnnnnnnnnnnnnnnnnnnnnnnnnnnnnnnnnnnnnnnnnnnnnnnnnnnnnnnnnnnnnnnnnnnnnnnnnnnnnnnnnnnnnnnnnnnnnnnnnnnnnnnnnnnnnnnnnnnnnnnnnnnnnnnnnnnnnnnnnnnnnnnnnnnnnnnnnnnnnnnnnnnnnnnnnnnnnnnnnnnnnnnnnnnnnnnnnnnnnnnnnnnnnnnnnnnnnnnnnnnnnnnnnnnnnnnnnnnnnnnnnnnnnnnnnnnnnnnnnnnnnnnnnnnnnnnnnnnnnnnnnnnnnnnnnnnnnnnnnnnnnnnnnnnnnnnnnnnnnnnnnnnnnnnnnnnnnnnnnnnnnnnnnnnnnnnnnnnnnnnnnnnnnnnnnnnnnnnnntgtgcttatgcttgtctgcaggctggcagaatttaatggcacaaaaactgctgagaagagcagcagattcccatgttgtttcttggtttatctgcaccatatgacacgagtgcgctgtaaatcttattccagggccagggtcacagttggccccataccctggcatctatctgtctccaacctgcatggacaaaagccagggttgggtttgtgaccttggaaagagcttgattgacacctcttccaagtatttctcaaataaccccaggattttctccaccactgggtgaatggttggtcatttgccacaggatcaatgaataacagggtagaggtaggtttacctaggacttcagtaatttaaaccataatctctctctctctctctctctctctctctctctccctctccctcactctcgctctctctcctctctctcctctctctcccccaagccccctttgtccttgtttgggtattctgaaaatcagtgtgggccacttgtatgctgccaaagatgctactctggtatagacactagaaggagggaaatagcctgccagtcagaaagtctagcgtgtctgatagggctttgtccgtcctgtggcagttctggtttcagtcttgctgctcaaggaagctaaggctgcagctcagtggtaaggtgcttgtctagcatggaggcaggaggatcacaagttcgaggtcactctggaatgcacagcaagcctaggctacatagccctcccctcaacacacacacccacaacccagctcccggctctgacagacctgggcatctctcagtcacggtccaagaagctcctctttggagcagttgtggagagacgcagaactgggtaaacaactgagcgtgctcagtcccaaacagagcatctatattctctttcctccaaggctcagggaaaatcttggaagagaaggcaagcagaaatgtgagcactagaggatgggaaggagcgccgtgaagagctagggtttggacatgacatggctatcaaattaatgaacctgcagcagctgtggttccctccagaagacccagcacaggatcaagcaaaattccatcccagatctcctgccctgccccgcccctcacggaggagctggtggcaatggctatctgctaggggagagagacttactctatttggagaatgtgggactgtaaaattcccatgatccagtggatggtcccatatccgtgcacatatgagtacagaactaactggataaaaggatagtaatgctactactaataatgacatgaagtcagaaagatcatgtgggggatgtggggagagttgtaggtatgttcatattttgttgtatacatgtatgagattctcaaaaaaaaaaattaaaatagccaagtttttcaaggccttcgttcttctgtgaaaatttaaatctgcttataaaatgctagaggcttcaaggcctcctgctgcactagaaatcatatgcaatctttgcataaaatactaatacttaatccaaactttcaaagattttaaacatattgagcaaattaacccacactctaaggaattcgattttctattaattaaaacagttcatatctttaaaaacttgagtaaagggctggagagatggctcagtggttaagagcactgattgttctttcagaggacctgagttcaattcccagaaaccacttggtagctcataaccattggtaatggggtcgatgccctcttctggtatgtctgaagacagctacagtgtgctcacatacataaaataaaattaataattcttaaaaagaaaaaatcttaaaaaaaaaaaaacctgagtaaaatgttgagtttgacagtataagtaagagatgaggtttacaaagcgcttgttaatgcggttttagtccaggaaaaggatgtttgnnnnnnnnnnnnnnnnnnnnacaggtgttgatgctggctgagggaagaagttggattctgtgggacaggaagcgtctgactattcacaggacgataagcagtcagaccactagcaggcagatgagatctcaaaagacagagctttcaattaggctcacttgggctttgatgtgttggatggagagccagtgtgcccataataaagagcttattaaggctgccagttggccttagaagagcactcacccagagggatgggatggttgaagatctgcaagaaccccaccaagactggtttcagcccgttgtctcacagggaaatcagcagaggtataattatgggtcactatgctcctctgcctccgtcaacctcaaagtcgccactgtagtcatttccactgctccatatgatgtgacattatatgatatatgatatatagcatatgattgatataatgatataacagtataaatatatcctgtgggctggtgagatggctcagtgggttagagcacccgactactcttccgaaggtccagagttcaaatcccagcaaccacatggtggctcacaaccatccgtaacaagatctgactccctcttctggagtgtctgaagacagctacagtgtacttacatataataataaataaataaatctttaaaaaaaaaatatcctgtggcagcatctcatatagcccaggtcaggttctggggaaggggaggctaggagtgcagaattgaagaagacatgggaaatgggtgaaaaagatgacgtgagcagagcttttatagtggagatggcaggggtgtggtgtggattcaatctgaaaggcaatgggggttgctttcaaagagctggttctatctaacaaatgatagtcacatcaagcctcccaagatggaggcaatgcaaaaccaagaacagaagcaaggaaatactgactttttttagaggcttgggagcagcgaggggatgtggcactttggaagccttggcttaggctattgtagaaatacacagtcatagtctgggggcatctaggccccttggcacctttgccccgaggcagaggggaaaaataagagaacatgaggactgggtttagaaaagcccggggatgcagaaccaaaagccccacttcagagacaaggagcttggcttaaattcctggggctaccatttaatctgggtgatgatatgggtggatggaggtgaagcatctgagagcctcagtttcccctactgtaagatagggacagctgctcttcaaccctagagagttgctgtgaaaatgaaggagcttactaatcacatccggatgtcatcattgccctcctggagactttatttctgctgtaaactgtttcctctgtgctttgcttgtatcctgttctgcagctacccacatgcatatcagctggaatatatttctggttacaacatctggagaagtcatgcgtgaatatgtgtgtgtgcgtgcacgcgtgtgtgcgtgcgtgcatgccagtcagggtcaaacctttgttgttgttgtttctcagaggctgtctgccttgtttgttgagacagcctttctcattggcctggggtttacttactggttaggtgaggcgagctgcccagtgaactcctgggatctgcctgtctctgcctccgcaggaccgagatcacaactgtgtgcaaccaacactctgctttttaaaacatgggttctaggaactgagttcagacactttgctcttgtgtcaaacacattaccaactgagtgctctctcaagcttcccagaaatggttcttttttaaaaaaaaaaaaagtggtcttctcccttatttgacagagggaaacaataaagaaacccggctcgatgcttggaactgcacatcagctgacgtgtgcttatgcttgtctgcaggctggcagaatttatggcacaaaactgctgagaagagcagcagattcccatgttgtttcttggtttatctgcaccatatgacacgagtgcgctgtaaatctcattccagggccagggtcacagttggccccataccctggcatctatctgtctccaacctgcatggacaaaagccagggttgggtttgtgaccttggaaagagcttgattgacacctcttccaagtatttctcaaataaccccaggattttctccaccactgggtgaatggttggtcatttgccacaggatcaatgaataacagggtagaggtaggtttacctaggacttcagtaatttaaaccataatctctctctctctctctctctctctctctctctctccctctccctcactctcgctctctctcctctctctctcctctctctctctctcctctctctctctctctctctcctctctctctcgtctctctcccccaagcccactttgtccttgtttgggtattctgaaaatcagtgtgggccacttgtatgctgccaaagatgctactctggtatagacactagaaggagggaaatagcctgccagtcagaaagtctagagtgtctgatagggctttgtccgtcctgtggcagttctggtttcagtcttgctgctcaaggaagctaaggctgcagctcagtggtaaggtgcttgtctagcatggaggcaggaggatcacaagttcgaggtcactctggaatgcacagcaagcctaggctacatagccctcccccaaacacacacacccacaacctagctcctggctctgacagacctgggcatctctcagtcacggtccaaaaagctcctctttggagcagttgtggagagacgcagaactgggtaaacaactgaacatgctcggtcccaaacagagcatctatattctctttcctccaaggctcagggaaaatcttggaagagaaggcaagcagaaatgtgagcaccagaggatgggaaggagcgccgtgaagagctagggtttggacatgacatggctatcaaaataatgaacctgcagcagccgtggttccctccagaagacccagcacaggatcaagcaaaattccatcctagatctcctgccctgccccgccccgcccctcacggaggagctggtggcaatggctattgctaggggagagagacttactctatttggagagtgtgggactgtaaaattcccatgatccagtggatggtcccatatccgtgcacatatgagtacagaactaactggataaaaggatagtaatgctactactactaatgacatgaagtcagaaggatcatgtggggagagttgtaggtatgttcatattttgttgtatacatgtatgagattctcaaaaaaaaattaaaatagccaagcttttcaaggcattcgttcttctgtgaaaatttaaatctgcttataaaatgctagaggcttcaaggcctcctgctgcactggaaatcatatgcaatctttgcataaaatactaatacttaatccaaactttcaaagattttaaacatattgagcaaattaacccacactctaaggaattcgattttctattaattaaaacagttcatatctttaaaaacttgagtaaagggctggagagatggctcagtggttaagagcactgattgttctttcagaggacctgagttcaattcccagaaaccacttggtagctcataaccattggtaatggggtcgatgccctcttctggtatgtctgaagacagctacagtgtgctcacatacataaaataaaattaataattcttaaaaagaaaaaatcttaaaaaaaaaaaacctgagtaaaatgttgagtttgacagtataagtaagagatgaggtttacaaagcgcttgttaatgctggttttagtccaggaaaaggatgtttgctttccggaggtctcagagccggccctggtctaaggctcttgatgacacattttcctcagctctaactttttgagctgaaggccagatgattgcaatggggccctagtgaaatgtcacaggaccttacaggaactgttctcttcgtgccatttacttgtgatgacaatcctgtgtcggctggccagccgccctcttagaatttgtctgccaaagagatttagaactgatctctcacccacccatcaacaaaagcttgcttagtggatgctctggggaatctgttaagcacgaccttggctgtcattttagaaagtcaggcgtgcccagggacacatcggtagcccaggtctgccaagctccctgtttctggctaagtttatattgatgagccagggagttttaggcaaactgacagaggtcacatacttggtagaaggaacagagagaatctgaactcaggtctttgtgctgctgacttttttctagggcctcacctgttcttgagcacggatgtgctaatgttgacaggaccagagatgaagtaggatgataatagttcttaaatgtctgtctaaacaggggtattatttagagcctttggcccctatcaactaattttcccccttccctatgtaccatgaagctgatgtctgtatccccacattacagttgaaggacaagacaccaagaggcgtgaagtgacttacacagggctgctaagcacgtaggggagatgagattggaatttccgacctctggagctccagcctgtagctttgaatgttaacctgtgctgctttgattttgctcctggagttagagatatgagctgaaggaaatactcttaaaaaaaaaaaaagatttatttatacaagtatactgtagctgtcttcagacacaccagaagatggcatcaggtccccattacagatggttgtgagccaccatatggttgctgggattagaactcaggacctctggaagagtagttagtgctcttaaccactgagccatctctccagtgcagaaatgctcttttgttcaggctcaagaactgtaaattctcagatgtgccagctctggtaatgtcagttccttttttttttttgtttgtttgtttgtttgttttttgacagggtttctctgtgtagccctggctgtcctggaactcactttgtagaccaggctggcctcgaactcagaaatcctcctgcctctgactcctgagtgctgagattaaaggtgtatgccaccatgcctcagctgtaaggtcagttcctttaaggaattgaattcccccagcatttaccttacaccccggaagccccagttccggcatcagatctcaccagaaacaaagcaggctgccacttcctcaggaagaggcctgcacaaaaagagtagttcctgggctggcccagccagccaagacatgacacagagatttcaaaagagataagtcactgtgttgtgctggtcactgttatcttttctagtctcagatttcctaaccctgactgggctatatgcaaatgtactggggcttgatcttagaaccttttgtatgctaaagcatgcggagcacatgcccaggccttgccagaaacctttgaatgccagctataacccacgcatatctgaaatgcagatttaatgagcttgacaccccaggttcagggttcagggtcccggtatgcgggcaggttgtctgtgactgggttgggcacttacattctattgcccacattagtagccagtggtgctcaggcctgggcaggcaccccaccgttttgcgttctgcccactgcttcctggggagtcctccagctgtttcctctttcataaccagtgtgctttgacatttgtcctttgagacccaacaaaagggagctggggaacagcttgttgcctttgttttctgaagtaactcccattaggacaagcttcccctgcagtggaggagccatggcctcttggaaggttggtactgatttgagttatcctggggggctgcagaaggggctgggcccggctgaggcccttgctatcttcattctctgtgctcacatctctcattggtagcagggcccagcaggcctcagaaaaagcttctatggtcaggaaaaccctgatctggtcccggagaaccaaggtgagcccggtggtgtgtgaggggctttgtcccacggagggcagctggtgacttcccctcccgtttacagatgctggtgtggaagctccctgcagaacttggaggccctccctcccactcccaagtcctcctgaagtctgcctgaagctcgagaggtcacactggttcagtgggtcagacaggctccaagagccacacgggttgtggagacccctgcttctttaccttacaatgcttgaggaactttgactgatgctctgcagagactcatggtttctgaaggagaggttgtgggtgcagatctgaaattgtgtggagaagataaactccatgtgtgtgatgattaattttctttctttttccaataatttatttttatttactttatatccctatcacaacctcttcccttctctccttctaatgctacccttacaaatttctcctcccattgttccctactcttctaagagaagggggatcccccttgggtaccactccactctgggacatctagacatcctctcccactgagtccaaactatgaagtctaggtagggggaaggggatccaatggaaggaacagagaccaagacagcccccactccacttgttagggatcctacatgaacaccaagctgcaaatttgctacaaatgtgtaggggagctatgtccagttccctggctggtggttcagtctctgtgagcccccagtggcccaagttagttgactccgtaggtcttcttgtggtgtccttgacccctccaacttgttcattttctatccctcagtcttgtacaagactccccaagctctgcctgttatttggttgtaggtctgttgcctctgtttccatctgctgttggatgaagcctctcagaaggcagttatgctaggctcctgtctgcaagcatagcagagggtcattaatagtgtcgggtgttagcgctctcacatgggatgtgtctcaagttggggcagtcatccattggctgttccctcagcctttgctccatctttatccctgcacaccttgtaggcaagacagatttggggttgaaggttttgtgggtggattgctgtctctctccctcctctggaagtcctgcttcacaccaggaggtgtccacttcagtctatatccccctctggtaggaatttcagctacccttcccccagtaggctcccctgtcccaggtctctttggcagcaaaaaggagctctgatggaggagtggtgtcacttggtggccactgcactaaggtgaatgggagttctggaggtgttgggtgagactggtatttcagggcagtgaagaaacctgtgggatgttatttggattggaagcatctctgcatggacaggcagcaagcctctgtgactcttggctcccttcacactgtctcctctgtgaccccagggtcacgccctctaagaacctggtgcaagtgcagagtatgagcttgacctatcaagcacctctgctgataccactgtaacctctcatagcccagggcaggatgcacagctccagggctccgaagctcagaaaaatgagctgaatggtcactgagtctcaggactcagtcgtcaggggagaaagacgtcaaaagttctaaaaggctacttctacagatgtttatacagcatgcagcccctttcttctagaaaaatgggctatttcctctgaattgcttatgtgcctttgctttgtagtcattgtcgactggttcaggtttcttcggggatttggagtatattctctttcaaaaacaaaaaataaaacaaccaaaacaaccaacaaaaaagttcatgcagttggaagcctagcatcgagcgaagcctagcatcgagcacctttctgaccatctaaattaatcacctaacctgctacctgacatccgtagcccctctcttacctatcacgctcatttggaaacagctattttcttgtttgtcttttctcactgcagtattaagctccctaaggccagggatctagtctgccctgttcagcaatgctgccctagcacagtaggttcccaggaagttatttgtagattttaggaaggctggggtttttaagtagaattcactggggggactgaggcccatgagtaggaggtctattctccccacaaactcaccttgctgtggtttaagtttcaagggatcttgtgccaggagcctagtcctcagtatgcaggttgtgttgagaaacgctggtacctttaagaggtggggcccagtgggaggtggcaagttggcccctcccccttaccctggcttcgcgtctcacctgcagtgtctccttttcccaggcactctattgtcactcaccagcgaggtggtgtggacaaaaaggttcttgtcaaagctggtactgtgtttgtgtcttccatatcttaccttggaagctcagttctgcttcggattctccacatagttgtgataaactgtctgcagtgcccaaatcctaattcttgccttgggctttcatctactctgccccaagtttttaggctccccagaattgttcccatctgtacccgccccgcctcccactcccctgcccaggtgccaagggttgtgctgagttctctctctctctctctttctctctcccccctccctccccggtgggtgtggtgtgtgttttgattttctaatggcagcctcacatgggagttgccattccctctgtgaacgcaggaaagagaggtagactcagagaccagggattcacagagctgaggttcgcacaagggggctgctgttggcatctttatgctaacaacttcacctgtcagtactgttccccttctgatttagcagtggccatgatggtggcaacttcaagctagagggagaaaagctgtcagtgcagcagaagtgctagggatagtaatccccagcaagtgtccagacaccctcttccaccagggtgggctttgcagctgagctcagaaagaggcccaaagccagagacagaatgccaggctacaggctgcttggtgttagtgaagcaggagagacaaggcagaagagaggaggtggaagggctagagggcaggactgttttccagtctagaagagagtgacagcgatggtggttgatgctgacaaatgagtcaactgggccccttgtttggtcatttctagattgggnnnnnnnnnnnnnnnnnnnntgaacgcaggaaagagaggtagactcagagaccagggattcacagagctgaggttcgcacaagggggctgctgttggcatctttatgctaacaacttcacctgtcagtactgttccccttctgatttagcagtggccatgatggtggcaacttcaagctagagggagaaaagctgtcagtgcagcagaagtgctagggatagtaatccccagcaagtgtccagacaccctcttccaccagggtgggctttgcagctgagctcagaaagaggcccaaagccagagacagaatgccaggctacaggctgcttggtgttagtgaagcaggagagacaaggcagaagagaggaggtggaagggctagagggcaggactgttttacagtctagaagagagtgacagcgatggtggttgatgctgacaaatgagtcaactgggccccttgtttggtcatttctagattgggctgtccttttccaagtcatacagatgcaatttaggtttgggggctggtggtatattctcagcagttgaagcaagggttgtagctcacttggttgagtgcttgagtaacaaacacaaaaccttggattccatcctcagttcctgtatttgggtgtggaggcagaagcaggaggatcagaagttcaaggtcatactcctttatatagagttcaaggccaataagagctctgagaggccttgtctaagagagagagagagttgaaggaatcagtcactgaagtcatgacaaccagatcctagatatctcagggtgccaccacgctcctaaaccatttccagctctacagctgaaccctcacatccattctgtgtcctgcacctccttcctgtgtctttcttaaacctgcatccaagcaggccaggctgcattctggatgaatgtctccggttctgggaattctgcaatgactgacttgcaggtagctcacacagacagtaagaaccaaaattcattggtcctcccaccctggaggactgactctaccaagagacctagaagaccattaggagcagcccctgctgggagttagagcgggcagctcactgccagcaaccctgcttgcctgtgtgaagtcgattgggtgctggcatccgatctttccccacggtgtctctcaggttagctcagacaccagctccctccctccaacccagactctcttccttgttctcagctgatgcattggacttccacccgtggggctaaacactggttcttgcacaaaataaaaacatagaaatctccccttgttctgtaaaaggcacagacacagaaacaaacacacagtctggaaacagggcagtgttttgtcagtattctaaagtgtacgtttcatgggggagtggggaagattgctttaaaaggctttgtagtgggcactatagcgggggaaaaagattaggaaacatggatctgaccagcggcttgtgtgacctcagcactggcactgagctttccaaacagtgtctctgctcccctctgccagcctcgccaggcaagtccaccctccgttgcccttcctgaaccgggcatgcctggcatgtctgccttccgtccagatccattcatggttgctctcatcgaggctctggtgcccttggcttattttctgtggttttccttccctctagctatggtatcgctggctcaaccaatgtgactggggatcaagtaaagaagctggacatactttccaatgacctggtgatcaatatgctgaagtcgtcctacgctacctgtgttcttgtgtctgaagaaaacacaaatgccatcataatcgaacctgagaagagggtgggtctgtgtttacgcctctgaagacttgcttgtagccattttccttctcagcttcatggaagattttattcacttctctaagctagatttctaccgattaccaagctctcttgctcttctgtgttcccaaacctctcctcttaccttagtcccagaggttgcattgatcctgctctccccgtctctccagggtacgtctctgtcactgctgtgtttaagggatcattacagcctgattctggtagttgcctgttcatcatgaccaatctccagccttcgtgttagacccacagccaagctgaactgcctggctcaggcactgggattctctggtgctcagagtgccttgtgggggaagaggaaaaagcaatcgtctgtgtgccccaccatctagctccacatgagcatgctgtaggactcagtgataaacaggctggggaggatggagcaactgctgggaacatgctcaacactgcagagagacccagggacttttgagcatggcacgctgcagggcagagtttatttggctcctataagataatagcagctagtcatatcatctttcccccatcaaggcgaattgacaacatggaagtgtagaactgggaaagaaaatcagcttaaacattcagttcgtgttgaccttagtaagggacagaagccaggctaatgtgacctgctctacagcccttgcaaaacatcactacctgccacagaagtccccaatcatctccacgttgttggccaattctccatctctgcctgctacccctacctaccccctccactgccccggtgacatgccatcatagtggctgctgtctcattttccagtctacagtttcctgcatctgtggaaatgacttgttaagaataggcaatgagggagtcccctgactctgggagagacttaaacacccctccacatctacttgaattgctaatgggaatctcccagtgatgagctcataaaccgactcccttgaaaaatgtctccgatttgttgatctgagagaacttagtggtataaatgttcggtctggcctgcctgcacacggtcactgtagtgtccctgacggagcttggaagagcctgttcaaggagctctcgagctctcagctctcctgagctgagctggccagcccgagtggcaccacagcagagagccatttccttcaggagtcatagcagggattttgttgagtaatctgagcaggaaagtctagaggatccatagagagagtccattaaaaagccagtggtcaatgagctgaggcaggaaacaggaggtgggacactggcaagaagagagaggattctgggaaatactaaaagagagctgttgggagagacaagacaggagatggactggagagacataaaccagctgataaatgaaataaacctaggaagacgagaaggaagaagtgggccggggttaaaggagaggtaactaaccacatggtagacatagaatagtttaaatgggttaaataattaatctcagagtctgggaaggaaaaacagatagaatatacttgcaaatggtgcccaacatggtgcaccatttataataattattttaataatccactttttcctctcccaattcctgctcctgaaatgatgactctgagattaaatatttattaataaatgcctaggcattattagctttggctcattccctgactagctgatatcttatttagccacttaaattattctatgcccacaacttggttggttacctctccttcaatcctggcctactttttccttcttgtctcctcagtatctctctgcattcatctacctgctggtttatgtccatctcctcagtccatctctggtcttatctctctcgtctctcccctcagctctcttttatctcttactatttcccagaatcctctctcttcctgcctgtgtcccacctcctgtttcctgcctcagctcattggccgttggcttcttcattgacaatccatgcttttaagagagtttctctacaagtagcatctaccaagtgtgagtgaccaatgtcttacaaacccaagtgctaagaatggcttctcttgccctcaggccttaaaagtaagagaaacaaatgactgattctgtttggcttctttcctttggctgcccagacactctcaaaccaagtatgattcagttacatcagtgacataggaagcaaagatttaattatctgtctgtctgtctgtctgtctgtctatccatcttctcatactccccaacagaatataaataagaccatttcacctgcctgtcctttcgagtccattcaacgcatactcaccttgtttgccttctgtgctttttgcctagggcaaatatgttgtctgtttcgatccccttgacggctcatccaacattgactgccttgtgtccatcggaaccatttttggcatttacagaaaggtaaagtgaagtcaggtaaagtgtacagagtccctggctttgatcagaaaataaacatggaacataaaggctgtgaggcttgaagagatctgcagccaagccttgttgccctgcaaatactgtgcaagaaagatccacaaaactgctaagatacggtggtaggaggctggtagacagagaggccatttccctcttttagctacctctctcttttacaaaagacgacaaggcagatattgtgacaacctccccaaaccagcccaacctgccccactgctttcttctttaagccaaaagcttcgtttcatacaatacagagaacaaaaccaaacaagtcttctcacttgagccaagccacctctctcttagtctagtcttcctctagtaattggcagaaccaaaaagtattcagttcccagaaccaagaatggaactgtaaaaggaatggtttttttttttttttttttttttttttgctcttgtgagagaaaagccttagggaaaccaactaacaaaccaaaagacaaacaaacaaacaaacaagaaaaacaatttttcttttcctcccccagcctctggtaacttctgctccctctcaagttcttcgagacaagttttaaaatgtgctcttactctaggttatgggaaaaaaattgagcagcatctaacttgtcctctcatgactccagagagatgctacaaactgtttctgagaatgtctttgccgtgggagtaactgaccacactgctcagagagcgtgtgtttcaattgacaacagctcacagaatcgatttttctcatgaaatactcggccctgcagccctttgctaatctgtttaaataaagatggaaaaggcaggcaaaaggtgctggggcctgtaatcaggttacctttatggagctggcgagaatatgtgctgctttttgggagtgataatggagacacaagggaatatcaaatcagggagatgttaagaggctgttgactggaaagaaagatcctgatacaggatgcagggacccttcaggaagttgcaatcagaatactgctagtgtggggagggaggcaacccctgggatgggatctcagtagcttccgtgaaaacagtgggttccaccggagggtcttgatgcccttgggggttccatgtcagatgcttatattatgatttacaacaggaggaagagtacagttatgaagcagcaacagaaataatttcctggttgggggtatcacagcacaaactgttattaatgggttgtagcattaggaaggttgagaaccgttgcactgcatcctcttgatacatcctgtggatggctgaactgggaaaaaggaccacgaaacaaacggaaaacatgtctttattttctcctttgctttagaaaagtactgatgagccttctgagaaggatgctctgcagcccggccgggacctggtggcagccgggtatgcgctctatggcagtgccaccatgttggtccttgccatggattgtggtgtcaactgcttcatgctggacccggtgagacatttctcaggcagagtgtttagctagtagctttgaacttgtacctggtgtgtgtgtgtgtgtgtgtgtgtgtgtgtgtacgcaccacccaacctagatgctgagaactgaccccaagtcctctggaagagcagcaagtgctgaactatctctctaactccttctcctctttttctttttccttaaaaacaaaactaaacaacaacaaaaaccatacacaaggtacaaagcacagcatggtgagagattgcttggggcgtgacaaactgctgtaaaccagaacaccatctctacctttgatctgtgcatgggtaacaaaactgtactttcaccttcctgggagcaggggcacttaattaacaaactaagactggagaggagggtgaatacacaagtcaaaatctctgcatacggccccaggggaaaacagggcaggtccagagccctggacctttaatctttaatctgagagatgggtacagcctctgataccagtgatgtctgccaaagtctctcctgtccacattgtccagtcccttggatgagctcctggtgccctctctcttaattttgagttgacagacattgggggggggggggggaatcagtctcttgactgttgattgcatacaggcttgtgaacaggtgggtttctgggtactcaggagcctccctccccggatacagatgtttgcaggatcagtgcagcagctggaatgttcccttgctgattgccagggcttctttagatctgaacccttttgcttgctctttggcctgatggaggcaaggctactccagggagatgctaagtgcctttcccttccttatgtctcccctgcaaggacaagtctgatggctaagactcacctgtggccacaagtgggtttccagcaggtgtcagctttcactgagctcttatagctcctggcttcatacttaagagactctccttcacctacgcaggtgggtactcaggctgcataccaagatggctgcctggggagcacgggtacctgagctcagcaggtagcccccagctgcttgcggtgagagagtttcctttttcggatgttttaggtggagatattcatttttgtcttcctgactatacaaaaatattcctgtaagtttgtggcccaaatttttagagattgaaaccagaaggcacaaaagtaaataagcgaaggctcacttgcagtgatgcactctgtgatcttggttacttcccctcctcctccgcctcagccctccctagcctcaacacccctctgtatctccaggaatgagtcttatcctcttatttatttatttatttatttattgttagcaccgatctacttttctttttcacatacctctttcattcatgcgtcttagcgggtttttccatatataatggattttggtaggtttcatctcctggattctctctttcccttgctagccagtcctctcctactttcatgtctcctctgtgtgtgtgtgtgtgtgagagagagagagagagagagacagagagagagacagagagagacagagacagagagagagagagacagagacagagagagacagagagacagagacagagacagagacagaggagaacttaaatagggtttcttgtatgggcaccaggcacgggcaggggctctttataggggcatgggcaacttatcaatgaccatgacagtgaggaaaatgaccttcaaaacattaactgataattgtccttcatggaggggtggggcctcatgagtccctcccccatctatgatgttggaggcagggtctcaaaatgtagtccaggttgatcctaaattcctcatcctcttgcctcaacctctcttgtattgggataagagttgtgctctcccgtgtctggccttgtggaaatcatttgcactctattcttctcaccactggagcctttggctgcagtcgctgtgcactggaatgaggcgtggtcatgtcccatgctttgttcatgcctgggggagcttactggtcatctctctacctttctctcttgtttcaaagtccattggagaattcattatggtggacagggacgtgaagatgaagaagaaaggtaacatctacagccttaatgagggttatgccaaggactttgaccctgccatcaatgagtatctccagaggaaaaagttccctccggtgagtgagacggcaggtgggactggtagggtgttcagccctgggagcagtgtccttgagagcaaaagggacacttgacattgagaaggtctggacttctctcttgatgagaaaatctacggatgtgcattttatcctggagatggagagagaggtgggaaccatggagccctagatgctggggctggaaagcttgctcagagacatcaaaacccaagtatgatttcatttttatctctcaacatatcaaaatctggacaataacgtcaaccagatgagttcctttacaacaataaaacattccttggggggtgggggggagggctggcacccaagcacctactatgtgaggtcacccaagcacctactatgtgaggtcacccaagcacctactatgtgaggtctgtatcttcaggcctatgccttggtggacctctgtttgttgtatgaagatggtcgttgtcaagcaggggagatggctgtgtaaactgtgtgtttacacaaacatgggaacaggagattggtcctccgggtccagcttccaggaggcctgcccggaatactcgtgtggggagggtgagatgggatctcctgagcgagcagtaaactaggagcaccaaatcatcaagcttatgtgaaaaacccatctccgtatccaaggtggcgagtgatggaggaagacactagacgtccatctcttgcttccacatgcttttacattcccataaccccttgcacatagaaacatgcatacacacctgcatgcacaccaccaaacacacatgcacacgtgcacatacagagacacatgcccatgcagacacacacacagacagacagacacagacagacagacagacacatctactttggtatctcactacagaggttactaactggagactatgaaaacgaaagatggctgatatgtccgggggctctacaggggtgtctgattctgccttaccgttgatacgcttttctgagaatgtattccacatgttaacatggcatccggggtcctcaaagccagccccaggcttcctctctagcatgggtttctctcctttcccaagcacaatcctctgcacacacgcatgccagcaggccctgtggcaacagcctttacctctctgctgttaagtcctggcttgtacggcgtcttctcctacaaaacatacagctgttcacctgcccagttctttagctcgacagaacccttgtcaaccttcaagttaaaatattcatattgcctgttccaaccccatagccagaaccaaccacactctccttggaagctactgccagaacgtgacctgctgggagataactgaataggccttgtccccataacttcccttgttctctggaattggattttcattttatgtcttatctcagctcaaagagagtgtttgtaagatccttgctaagttgctgtggagaagaataagcaccaggacactaggagtatgcctctcatctcccacagccctaatcctttgctcttgttaaccttgtaggatggttcagccccctatggtgcccggtatgtggggtccatggtggctgatattcaccgcactctggtatatggagggatctttttataccccgccaacaagaaaagcccaagtggaaaggtatgttcatctcccaaggaagtgagagagaggcagtgaaattcgtttctggcctgggggatttgacttcattagggaaacaaaggccatggagctgatgaatactcctgtggttgctaagacatctgtgacatagtctctagatttgaggcaaggcccagattgtatcaactaatgtcctctgccggaggcgatggcaaaagagaattaatggagatccagcaggggactaaacatgctcagagcttccaggggcatgggtttggcttgggcagaatgggttccattcatagagggaaatgaaatagtcttgtctcattgccaagacagaaaatcaaatatgcattgcagagaggggtgtgctttgatggctcccaaaaggcctaaaatagatgtactaatgagcttggcatttgctacttgggaagcaatgtcgtctgacgagggacaagactatggggaaacccagagcttccaggtggaattttctactgactgcactggtctgtgttatggcccagttcccagaaactcacaaggctagtgtgccttctaatgctggctaagggagattcttttcttcttcacacaagaggacaaaatgcgtcctttactgtcttctttgctacccatcacccctctacctctgcctttcctccacctctgcctctgcctccttctctctctctctctctctctctctctctctctctctctctctctctctctctctctggcccaggatggttttgaactatgtagccaaggtgaccctgaactcctgatcctcctccttccacctcctcctaaaggctgggtggtgtgaaccaccatgctgggttctacacagtactaaggatcaaattcagggctttttcatgagggacaggcactcttagcaactgagctacatccccagcacacctctctctctctccctctctctctctctctctctctctctctctctctctctctctctctgtatgtatacacacacacacacacacaagaaataggaggaacggtgcccttaggatgtcaggaactgagactgagggtctgaccagtctgcttgtggccatgtgaggtgtgtgtttcactaaaagtcacgtcgcagcctggaagtgtacagccagcttgctttctatcacactttccccaagcgactcactttccttttcttggaaagaagtgtggaggtgctcccttccccactccaggctctcgggtctggccctgattcccatatggaaacagactcaggaagcacgagcacaggccaacggcatgaaaacgtatgcaataaaaaaattaatattcaaaagcaaacaccaagatacatggcagcagacaaaatcccaaccctggagcactaggcgggtttccacgaggagtgaacagggctggagacaatagaccactgtttggaggggccagtctgccttccagatgtctgcagccagacaccactgtggattttaaaaatgctttgggaacagacagagctccatccaacacacacggaatcactcattaagtccagtcactggctgtaaagagttgggagctgttagtgctgccaaaatgtcactctgtcccaaatccaggtggtctgcctcatgtttgcctcaggtggctggctaggctctggttccatgaatggttttattcaaacataatacctaatgatttttgtctctgatacattctgggacgcaagggagctttcctaattcaaaaggagagagagagagagagagagcatggacacccccccagctctgaggcagagctttacattagaacaagctcacccaaagagtacatatggtacatatggagggacccatttggcagagaatggctttgttgtacataagtgggaggagtggcccttaggcctgaggggcttcgatgccccagtgtaggggaatgccagggcaggaaggcgggagaagatgggtggaggactatcctaatagaggcaggtggtggtggtggtgtaaggggttctggaggggagacctggaaaggggataacatttgaagtgtaaataaagaaaatattcagtaaaagaaaaataagaaaataaagagcaagcgccccaaccctgatggtgcagcttctggctgagggccttggtgcctctgatcttgttttccagctgcggctgctgtatgagtgcaaccccatagcttatgtcatggagaaggccggtgggctcgccaccacgggggacaaagatatattagacatcgttcccaccgagatccaccagaaggcaccagtcgtcatggggtcctctgaagatgtgcaggagttcctggagatctacaggaagcacaaagccaagtgaaggccagccttgcccctgccccagagcagagctcaagtgacgctactccattctgcatgttgtacattcctagaaacaaacctaacagcgtggatagtttcacggcttaatgctttgcaatgcccaaggtcacttcatcctcatgctataatgccactgtatcaggtaatatatattttgagtaggtgaaggagaaataaacacatctttcctttataaattattttttctttagtgcgttgtgtcagtataacactagacaactccttcactccccacaatggcagccacactggaacgccgggtcgggtccattttatccaaggtaacatggagaactgaaggtccaggaaacctgctggtggtctccagccagtaggtggcaggtagggctgggaggtgaacgcaggcatcctggtcacttctcatgccataaactgggccaacgtcgcgtcatttatgtgcagtactgttcagttctggctgtttctgcccttctagaaatgagcaagtgtccggcttctcaactttccccaggtgtccataaccatccgagacacaatggcagtttatgttactattcagtggtgctatttatgcaagaacggcatcgaataacaaagccatataacccctagggagggtccagttgccatggtgaagatgattgatcctaagaactaaatttaatgaaacagattatgtgccaagtggttactttttgagttaggggggctttcctaagaggacctgccacagctggtgctatgcagaaatacacccgcctggtgcatggtctattctgcacacagttcacccctttctggatcagaagttccagattatggtaagttatatcaaatgttagaaccctgtactcttgtgagctctctctctctctctctttctcagtgtgtgtttaaaatgtgcttcccccacacacttgtgaatgaaacactccactgatttcatgtccttcaaacaggaaacttggttcaatcccaagccttgggtttgtttttgtttgctgacgaaactgaaatcctagcattcctctgactccagctgtgactagtcttctcaggaaaacctctggactcaaaaagtaccgtttctgtgggggggggggggcgcgggggtatgtatagtgtgcgctcatatctgtatatgcatgtggagaatagaggacgacctcagatgttggtttttcccccctcaggtgccatttattttctaatttttaatttcatttttaaaataatggatcgtgtaccttgaactcaggtccccatgcttccaaggcaagtgcttagctgactgagttatctcttcaccctccacttgtcttccaatggtcttacagcatctgaggagggtgcagcatccagaaatgcacaccccagtaccatgatgaacccaagcagagccacaaaagtttcccttcctctgcctttgtctgtgtgtcccacctggtgtctttggatcgggagttggatccgatgaatggaatgttttcaagaatgcttgtttgtattcgctgagcgcattcctctgtatgtagccctgagccagggcaataacagcacaaacgcccatcctcatctgatatgtctcagattcagccttgacggttttagatgcagtccttggatatacaacacactccctatccataaaaatgcatggagacttcgtttctatgggctggtcttgcccagaagtgggtgacccttccacttacagcatctcctctgcaaacagccccctcacatgcaggctgccaggcctctttgctgacctcagtatcagcagaagcaggaagtgtcaagcagctccattgtgtttgcttttagagtttccatagattatgctatgcctcttatcttccaacctaaatcgcacagcaaaccagcagagggtgcatccatgaggacattcctctgatacaactggaagccattcctgctctggctttgccaacaagggctggttacacacagtgtatatggctgggcattggatagaacaggtcaggcgtggtggagattctcagagcctttggagtaactgcagcctgatccccagcctcaggtttgggaatcacttccagattcctgtagctggtgccatctcaaggatacattcacattcaaatctctgggactggctggccaacgtgaccctatctgggtgaagggtcactgtggctgtgattaagctgatgattttgagatgagctcaagctagaccccacggaggaccctaaatgcaggaagtgtctttataagatcacatagggggaggatgtatattagagttctcaaaaaaaaaaaaaaaaccccacaagtgacagaatgagcacacacacacacacacacacacacacacacacacacagagtgttagttactgctggaagggcttgcaggatgcggctgtctccaaaagaaagagtaatgatcaagcatctgctctatgagactgaatgatttaacagtcccaatctggtgttaaaatcccagggaggtcctagagatcagagattggcaagtctgtgttggcgttcctaagaaatatgtcctaacaccaggaaaggaagggatcagcatgactggtgaacttgccaaaaccttccttcctccttccacgtcttatttatgtggttggccaccagaaggtatggtctggatactgggtgggtcttctgacctcaaatgattcggatttagggtaggcctcctacctcaaatgatccaagaaaaatccctcccaagtgtgtctggatgcttggggtttagttaattccagatgcagtggatgaccacaattagccacttaccctatggcagtggaaggagagaccagagtgatgtcacaagccacggcagccaaggaatgcaccaaagccagaggaggcaagcaaaggcgctccccagagctttcagaggaagcatgggcaccttggttctgggctttgggcctccaaaatggttaaaaataaaattaatcctggattgttgggtgtgttgtgtggaacaatacatccgtgtgtgtgtgtgtgtgtgtgtgtgtgtgtgtgtgtcgggggcacgtgggctcgggggcacatgtgtctgagtgcaggcgtatgtagtatgcacacatatggagaccagaggttggtgctccatgtcttcctcaggtgatccccatctttttttttttttttttttgagacaaggctttcccctgaccctagagctcactgactgtgaggctggctgcccaaggagccccaggaatcctgcctttgtttctaaagtgctgggactgcaggacacatctggcttttacgtggtcactctggctggaacttgggtccttgtgcttgcatggctatcaccccgtcgaccggtttacggagccatctccccagctgcacatcctgtcgcttaaataacctggtttgtgactttgtgtggcaggcctgggaagtgtcttcccagcgcatatcacaagacccccgtgtgacagcccagagggcttctcctccaatagtggtgggaggtggaggtagctgtgaaccagaaaaggaaaagggcacaggttaactatgtgtcatgtcacatgagacatgtcactaatgtgccagtggtcccaaaacacctctgtggggcagctctcacccgcctcatctcctggggaagcttcctttgcatctaggccacaaaggtgccacatgcagatgtgctaggatcacatgacaggattagataaagcagttttgccaacaggaagggtcctcagacaatcttccagaaacatatttctttgtccaggtctctggtggacggtcttacaagctttaactgttccagggtctgtttgtcctgatgcgctcagacgtggggttttcatggaacacaaccaggtcctcaataactctgtcgctaatatgtcagcagtcctgaaatacctgggaggggcagctgccacccagcatccagaatgtcactgtggccacgctatgagtttccagtctggtgtgtaccctggaagaactttggcatttgcagaaaggccagcagctgctgtctcaggccacttgggcaacttgaacgtctaccctttaagtgcagctttgtgtatgggccagaactcgacattaggcatcttttttctttatatgttgacagagtctctcactgaacccagagcttactgatttgactagactggctctagtctcttccccacagctgaaatcacaggtgcactccagtatgtctgggttttaacataggtgctgaaaaatccaaagattctctggcttgcacggcaagcacttcaccaatgaactcagtcatccagccatccttccagcctcttcaccaatgaactcagtcatccagccatccttccagcctcttcaccaatgaactcagtcatccagccagccttccagcctcttcaccaatgaactcagtcatccagccatccttccagcctcttcaccaatgaactcagtcatccagccagccttccagcctcttcaccaatgaactcagtcatccagccatccttccagcctctgaatgaggctctcaaaggggacctttgagtacctgagaggatgcaacagccacagcctggaagaccaaaatacagtcatgtacaaatttctctgagctatgaatgttctgtctgcatgtgtacctgcaggccagaagagggcatcagatgcctttgtcgatggttgtgagccaccatgtagttttcgggaactgaacctctggaacagcagccagcgctcttaaccgcttattcatctcaccagccccaccaaacaaatttaattgaaataattatcaagggaggatataaaattgcaaggcaaaatgcacaccctcagttttgttgactaacttatttgatagagagtcttgacatattgcccagacttggaattctcctgactcagctctccaagtaggtggagatattgaaattatttatatgtatgcttatagttctaggtacactgaagagctggaaggatataggtttctaagacaccgagttggataccaggcacaccgactgattttgaatacttagagccactccaccagttgttgtctgaatttatgaggaaagcacagtcttacatgttgagcattactctcaaattaatccacatattgggtagccagcttgggacccagagccaggtctgtctgccatcagagaaagttaggatatcacagtaacagagagcatggccaactctaagcagttaattctaggtcacctttaaaaagtatttctttaagcgtttttgttgggagctattaagataacactattgtcctgatctctgaattgggcctattcccccgagaagaaaagagggtcaaaagcgggccaccggcacaccgctccgagaacaaccacagattgttccagccctaagtcagcgcggatgtcctgacctcaagataccctgataccgccaagttcctgcttccacgtgtaactgcctaagaatgtgcaattctattgcccctcccccactgataagtacttctccttttgcttgtattgccccatccctcccgctgataagtgtctgtacttccccttttccttgtgcaattctattgccccatccttcctgctgaaaggcacttccccttttgcttgtgcatttaaacctcaggcctgactaatacatttgggggctttgatgcattctagaaggtctccgtgtcgttattcgcacaaggccctcgtccctctctaccccccatttggttcttaggaggaggtcccctcgagaccctcgaataactggacctgctggacgggtcacctttttatgagaccatttcgtgtgtctgtctcctacacatgctccacttacatgcttggtatcctggaggtcagagagggcactggagcttcccagaactagagtaaaagttggtatttggacccaaagccaggtcctctgcaagagcagccagtgcggtcctgatgtatgttttcaaatcaagggtttttaaaataaaaataaaaatccagagaaactggcaaatcaaccctgagactagacactctgctaggaatgtaatattatcttcctcatccctccagttacacatgcttaatagaagcaagcctgaaagaactcttgctccagtcaccctgggattgccattagtttgttatgtgacctatgccccagataaagaatctgccaatatgccatctgagagtctcaaccgtgcagaatgacacccagtggcggctagctgcagaaagccctcttgcttcccataggaggaatttgtgagtcattttattagctagtcttctttcacctgtggctgatcctggcttcttaggatcaaacaaaacaaaactgggtgtagagattgaggccagcccttccctgtagcgcagtactatttacagcctgcttcttgcactgtggcagctgccaccgtcagggagggaggccagggaagtttccttgagggcttgtccggctatctgagtcacgtggggtggggttcatttccctcggactttggcacagtcaagtgcaggtgtgtcttcaacgagtaggctgtgaggctgctgccttgagagagcaaggatttctacaaggagcaaagggaggctttgggatctcatttgcacaatgacggacagaagcccctttgagacagacatgctgaccctgacccgttacgttatggaaaaggggcgacaggccaaagggaccggagaactcacccagctgctcaactcgatgctgactgccatcaaagccatctcttccgcagtgcgcaaggccggcctggccaacctgtaagtcctggagagcatgcgcgggcaacccaagccagggtgtggaagccacagaccggtgcttgtgctagaaacggggtccaaagctaatttgctctttgtgccgtaaggacactgcatttaaattctttaagcctgctttgataaagcagcctttggcatgttttgcaaggaaagggaaaaactgcttagcaacaaactgcagagaaaagtgtgactaccggttacttgggattataatggtaacactatagcttgttgcctcaaaacctatattgaattctcattacttatatttgcaaagtcttaatgggactttaaaatgtgttttgatgccttttttttttttttttttaccccgtacaggtgtgttcagttgtcatgacctctgtcagtattgtggggtagaaatcaccagaacacaggttaagggggcttgactgtcatgaaaagaacctggctcagttttctccatcttcacgtggtgttcaggaatctggacaggctgggctggggcaggcacagcagagcacctttgcttggttctcttttgcaaaacagggccacgttcatgctggagttgctcttggccacagccaggagtacggttttaaggcatgatgaaaagaaatcacttcctttggacttccattttgattccagtgaagggcccctctgaagtcgaaggaagggacatacatgtggggggggggggggaaccctcgaagaagagccaacaaagtccacctatttaaaatgtttattctcgatcgtgtggtgcctttattcccaaactgtgacagcattaatttcataattgcaatcataaaaccaccacagagcttactatgtacgtgtttaggaacagataacaggacccaaattaaagatgattgattggctctttccccggcccgtgctgtcccttaactgtgtgattacttcattcggcaagaacggccaagcgctctctgcctttaagaacatgcttccagaatgggcgttgcctgcatgtgtgaagatcatccccgagtaacattagatagcgtctttgctactcctgtgttcccgctctgctataattagggcggtttcctgtggccactcaggacttttgcccacacttttaacccctcctccgtgcaggcctctcggctccacagcaactctcttggcagcgttccttgtgtatctgccacagtctgcttctcagtggttcagcatccgaccaagggccatgaaggtctagatagttaagtgctttatttaacttggtttttcttaccttgtagctgtggaatatggtttattctcgctaagacctccatgtttgtaaatctgggagctactaatagttttaacacaaagggctgttacaagggttagtaagtcattagggctatggttctgacagtgataaatactcaagacatgccccactattagctaccatggttctgagaccattcgaggaaaaacttacagactggcctatgtggtgattgaccacttggtggcaggctcagccctggaagtggtgtcagacagagtcctaggtccctggactgctcttcatagtggggaaaccctaacctcctcacacagagagcagccacgggggtggggaggagacaggggctgcaggtaccctggccttgtccagtgcagctgtgtccagcctttaggcatcgtgacaggacctcgtggtttacagatgtgttgggcagcattcacgcacatggccagtaggtggcaggctgtacacatttgctcagctcttcatgccccagcaacagctgcttacataggagactgtgatcctgaggcagagcaaaccaatttaattgttctatttgtttgcttacacgctgccgttttgaaccaaggggtaacagcctttgaggtcatgacgtttgacgtgaggttgtttcccaaggctcatcataccatacatcaaattctggatgggagtaaagtgggaggggacgccgtcagttagagaaaggggaggggtgcttttatggacgtcagcgtccatacgcggctctcaactagagacacctgttcgcatcacctgaggatttcttcaacaaataaatggaattaaagggaagggaagagggcaaatggcttttttttttttttttttttttttttttttgccaccccttctccatagttcagcaggacctggctctgagtgtgggttagttagcttccccattgctgtgataaacaccaggactaaaagcaacttggaggaggaaagcagtccatcactggggcgcgcgggaggggggaggcgtggggggtggggggacggttcagacagggactcaaggcagggacccagaggcaggaactgaagcagaaggcacggagaacgctgtttactggcttacccagcaccacccacccaggggtgacaccatccacagttgggtgggcctctcacatcagtcagtaacaaagaaaacggatgtttccacaggccaatctcctgaagccattcctcgattgaggttccctcttcctaggtgactcgaatttgcttcagattgacagaattaaagcagcccagagtgagacgagcccgaggttatcggggacaccctgaaggcttgaggtgtgaggaggagattgtgtattatggctctaaaacacaagcctctgtagagatgtttgaagttgaagcttgatgttccagtgtcgaaaagctatgaccatccactctttggtacccttagttatccttaggggctctcccgttccctctagctgccagtgccacgcaggagtctgcattttagtgagactggatctggtcaacttccttggaagaccaaggagacgtgacaatgcccccaaggtgcaaaggaagtaaccttgagtatcactgctttgggtcatagcacgctccctatgtatttataatttggagatggaagaggcacgggggagaagggtacctgtactgttggtttgggctcctcacattctttgctgggattaagaccccttcggtgacttaatctacccttgtcttcttaggtatgggatttcggggagcgtgaatgtgacaggagatgaggtgaagaaactggacgtgctgtccaactccctggtcatcaacatgcttcagtcctcctacagcacctgtgtgctcgtctccgaagagaataaagaggcggtgatcacagcccaggagaggagggtgagtctagcgccggctgcagtacctcccgtcagcagtagatggcgctactgggctgagagaacggattgttttgcttaaactttttctgggattgtcctgtattttaggacttttgttttctggaaacaaagcatttctcagttcttcagc

SEQ ID NO: 1653 - DNA, 1432 bp, Mus musculus
gagcaagggggtgtttcctgggacaggggggcggagacctggagactataggctcccccaggactcaagttcattgagtttctgcagacactgaacggctttcagtcttcccgctgtgactatcacctgtgggctccacctgcctgcacctttagtcagcacctttagccagcacctgcgccagaccccagcaatggcgaaccatgcgcccttcgaaacggatatcagcaccctgacccgcttcgtcatggagcagggcaggaaggctcagggcacgggggagttgacccagctgctgaattcgctctgcaccgcgatcaaagccatctcgtctgcggtgcgccaggcgggcatcgcacagctctatggtatcgctggctcaaccaatgtgactggggatcaagtaaagaagctggacatactttccaatgacctggtgatcaatatgctgaagtcgtcctacgctacctgtgttcttgtgtctgaagaaaacacaaatgccatcataatcgaacctgagaagaggggcaaatatgttgtctgtttcgatccccttgacggctcatccaacattgactgccttgtgtccatcggaaccatttttggcatttacagaaagaaaagtactgatgagccttctgagaaggatgctctgcagcccggccgggacctggtggcagccgggtatgcgctctatggcagtgccaccatgttggtccttgccatggattgtggtgtcaactgcttcatgctggacccgtccattggagaattcattatggtggacagggacgtgaagatgaagaagaaaggtaacatctacagccttaatgagggttatgccaaggactttgaccctgccatcaatgagtatctccagaggaaaaagttccctccggatggttcagccccctatggtgcccggtatgtggggtccatggtggctgatattcaccgcactctggtatatggagggatctttttataccccgccaacaagaaaagcccaagtggaaagctgcggctgctgtatgagtgcaaccccatagcttatgtcatggagaaggccggtgggctcgccaccacgggggacaaagatatattagacatcgttcccaccgagatccaccagaaggcaccagtcgtcatggggtcctctgaagatgtgcaggagttcctggagatctacaggaagcacaaagccaagtgaaggccagccttgcccctgccccagagcagagctcaagtgacgctactccattctgcatgttgtacattcctagaaacaaacctaacagcgtggatagtttcacggcttaatgctttgcaatgcccaaggtcacttcatcctcatgctataatgccactgtatcaggtaatatatattttgagtaggtgaaggagaaataaacacatctttcctttataaatt

SEQ ID NO: 1654 - protein, 338 aa, Mus musculus
MANHAPFETDISTLTRFVMEQGRKAQGTGELTQLLNSLCTAIKAISSAVRQAGIAQLYGIAGSTNVTGDQVKKLDILSNDLVINMLKSSYATCVLVSEENTNAIIIEPEKRGKYVVCFDPLDGSSNIDCLVSIGTIFGIYRKKSTDEPSEKDALQPGRDLVAAGYALYGSATMLVLAMDCGVNCFMLDPSIGEFIMVDRDVKMKKKGNIYSLNEGYAKDFDPAINEYLQRKKFPPDGSAPYGARYVGSMVADIHRTLVYGGIFLYPANKKSPSGKLRLLYECNPIAYVMEKAGGLATTGDKDILDIVPTEIHQKAPVVMGSSEDVQEFLEIYRKHKAK

SEQ ID NO: 1655 - DNA, 56716 bp, Homo sapiens
cgctggtcacaaaagtcattagcgagatcctgggctacttcagccggttggaaccagtagaggtgaaacacagcagccctccgtttaatgtttccccagcaagggctgctctcagagaaagtcttttccttttgcaacacagtgtgttgtctatgccctggagacacacggtagttcctgccctaagagtctgtgggcagtgagagcccacaggagggtagctgacccagccctggggaacccggccttcagagacctgcctggtggccgggaattaccctggacaagtgagctcagggtgggctgaactgttttccccagatggaggaagcagccaggcctgcactctgaggtcgtggaagccaggcaggctaataagagtgtggaccccagagccagtgcgtctgaactagaatgtccttcccctgcttctcaactgtgtgaccttggaaatgctgctgagcttctccaaaccacaggttcctcatttgccaaaggggagtgctaactgcacttaatcataagggtgtggtgggaccaaatgagataattcatataaaagtgctcttagcttgatgctaggcgtgtaataagccttaacaaacgcgagctattattattgctcagagcaaaagaatgcaagagaaggaaggaatttggcaaaacatatacctccttattttacagatgaggaagcttggctagcaagatgaagtgaccttcctaaggtgagctgatttctagcagagccagtcctggaatatgggtgttctctttttcagtctcatctgatgaaaaagaagcaatatgtttagtacctacaagcaggtttcggaatcagagaggcctaggttcaaatcctggctctaccatttcctactgtgtgacctcgggcacaagagtaaagctgtttaagcttttgtttcctccactgcaaaggtggctaaacacctcctcagtgggttgtcacaggaattaagtcagatgaaaggcattgaggacataggcaagaaacccagcagatggaagcttcttcgtgccctttcctgacctttcctttcctttgctaagactgaacccccaaatgaagcattgcatggaagctaggctggaggcgggcacccagccctagagtgagtgagtggtgaagatttccccaccccgcctcgggttcagagcagtggtcttgcggaatttgcccaacacaacaggtacaaattcatagtcacagagtgagctgtgcaggaaaggcaaataaaagtgcaaaagtgactctggaacactcagcaggacagctggggcaggggagtggtgggagaggtggtgttcagggtgaaatgtggggtgggatgacatgcactgggctttaaatgccctgctcaagggctgtttgttcccagacaatggggagtcatgagaggtttgggagtgagggagtggtgagatctgagttactttggaattaccctctggccttcaggagtcattcagcatgagggcagagatgggagggaggagaaggggactggcaaggaggagggaggtggaagagctgtttcgtaggcagaaagaaagtgccctgatgggacgtagaggttcaggaaggcaggatttatgctgaggttatatcaggagtggcaatgccatccggcccacatactggaatccaagatttattccatatgtgtgtctgaggttaggggaggcgcttttgagtacgttagagcctataagtccagttcattgtaactttcctttcacacggaagccctcacgtcgttaaggcgctggtggaaaaagaaacccctgccctgggccctccttccaggggtcttcgctcccaccagcctcagtgcaggtcagacctcaactggctcccacccagatggtggctctctgtttctgtcccctgcaggctcctctacgtgctcctttgggagaagcagatgccttggatgacatctgttagaaaacttggatgggccttggctgggcgcggtggctcacgcctgtaatcccagcacttcgggaggctgaggtgggtggatcacgaggtcaggagatcgacaccatcctggctaacacggtgaaaccccgtctctactaaaaatacaaaaaattagccgggcatggtggtgggcacctgtagtcccagctactcgggaggctgaggcaggagaatggtgtgaacccagaaggcggagcttgcagtgagccgagacagcgccactgcactccagcctcagcgacagagtgagactccatctcaaaaaaaaaaaaaaaaagagaaaacttggatgggcccctggcatcctgaggagtgcgtttcaaaccgtctgcagtgaaggaccagtttctgaaacattcccaacccatcacaggtcactgcttttgtaaaatacaacaaagaatgaatttctagaaaaatagaattaaaaagacatgtagaatatacctcccggatttttattattagattacagagacatacatttactgtgtcaaatcgctgtaactttttagcctccgtttccataagtattgtggacaggtaaccatttgtagtctggaggccccagggtagccgtggccaagagggcagagcacgccttcctcctgcattggcgccctccctccgtggcctcgcccaccggctctcggggcacgctgactcctctctcactaacacgctccacttcgtcgctctgggttacacactcacttcagctttctcatgctattttgtttgtttgtttttgtttttttttgatggagtctcgctctgttgcccaggctggagtgcagtggtgccatcgcagctctctgcaagctccgcctcccaggttcacgccattctcctgcctcagcctcccgagtagttgggactacaggcgctcgccaccacgccccgctaattttttgtatttttagtagagacggggtttcaccgtgttagccaggatggtcttgatctcctgacctgatgatcctcccgccttggcctcccaaagtgctgggattacaggtgtgagccactgtgcccggcctctcatgctattttatgctccctcagctccagaatgctccaccctggctaccatccctccatatctgctgcagccactgtgtattgggcgtatcccaacttccatgatttcagtgaatctgtgtaacagagcactaatgtgtgtaattacttacaccttttataaattggaggaggtctgtgctatcactataacaattcttggccagggaatggtcacctctctggaccaggaagagttccacactggatttttgctggaactagagggaaaggaagctgggctgactgagcacagttctggggatacctgtggccatacatggggcttcaaggggagagagtgtctgagagtgatgccacacagaggaaaggaaagccgagagatgcagacagaccctgcttccccgcagtttctggccttccttgctgatgacggtgggtgctgtgggatgccttgcagctcctcattaaggacaaagaaggggctcccagctcttgggactgctgccggtgggcggtgctcagctgtcatccgtctttggaactgcctctgctgatgacagctaactctcccacgtcacgccccttcccaggacagccaatagcccatgacatgttggcctggaggtctaacttccaggcctctttgccccaactcaggacagctctgcagagtcatcttagcttcagaggagctccccgcagggctggctgagctctttactacaactgcatcatggttcagttgccctctgccccatcctgctgctgcaatcatcagcctgttcctaatattatcagcaggggggagaaaatacagctagtttcctaggagagaggacccctggaacatgaggtggagcagatgggtggaatcgtggaaatagagcatggggttataaggagcctcaaggggccaccaggtccagaacaggaagggaagaacttcaaaatcttgccacctgaggagcagctggaggagctgaaaatatttaactggagaagtaaagatgtatggggaatatgacagcgggcttcacatatttgactgtaaatcaagtagaggttaggtcagactccttctgctgggtctcctggcttctgctcttgaccacctacggtccattctcacaccgtttagtaagtcatgtcgctccccagcttaaaaccctcccatcttctttttttcttgagacagagtctcgctctgtcacccaggctggagtgcagtggcgcgatctcagctcactgcaagctccgcctcccggattcatgccattctcctgcctcagcttcccaagtagctgggactacaggtgcccgccaccatgccaggctaatttttttgtatttttagtagagacggggtttcaccacgttagccaggatagtctcaatctcctgacctcgtgatccgcctgcctcggcctcccaaagtgctgggattacaggcgtgagccactgcacctggcctcccctgtcttctggctgcatgaatagaacctgagcgacttgctgtgaggcctttcataatctgccctcgtctctctttccaactttatctcctgtggttcttccctcacttgcccttcaggccacactggccttctcccagctgatccttgaatgcaccagggtctttgcacctgccgtagccttgcttgttcttctgtatgttcctctatgagctcttcatttgccccattcctttctgttgttcagtctctgatcaaaagtcatttcataagaaaggctttgagtttttacctcatcctgctttacagtcttcatagcactctgctccctgaaacagttttgtgtctttgttggttaaatgattttttttcttatctcccccacaaagaatataaacctaaagtggactgagctgtgtctgtcctgttcaccactgcaacctcagggtgtggtatggttttggcatacagcaggtgttcaaaaactatgtgttgagtgaaagaatgaatgaacatgagcccagaaatagctctagagtccagagagctgccgtaggcgggctcagagccttgcctgtccctggaggcatgacgtggagggaaactgccacttaggaaagaaccagcaagtcagtgggaatatggggtttggaatcagacagatgagggtttgagtctttgttctgtcacttcctgcctggctgcaggccttggacaggttatttgaccttgttggccgggcgtggtggctcacatctgtaattccagccctttgggaggccgaggcgggcagattacctgaggttgggagtttgagaccagcctgaccaacatggtgaaatcccatctctactaaaaatacaaaaattgggccaagcacagtggctcacgcctgtaatctcagcactttgggaggctgaggtgggtggatcacgaggtcaggagattgagaccatcctggctaacacagtgaaaccccatctctactaaaaatacaaaaaattagctgggcgaagtggcgggggcctgtagtcccagctactcaggaggctgaggcaggagaatggtgtgaacctgggaggcggagcttgcagtgagccgagatcatgccactgcactccagcctggacgacagagtgagactctatctcaaaaaaaaaaaaaagaaaagaaaagaaaaggaaaagaaagaaaagcctcagtcccttcatctgtaaagacaggggtttgattagaagccaccccagagtggttctggattgattaaaggctgcttctgaagccctgggcaagtgccacacccttagcaagtgctaaatagatgtttgctgtttagtttccacaccaggcccccggggccacaggagctgggggaggtgtttaaggaaggaccatgctactgcaatccctctcacatacaccacttggcttttgtttttctttttgtctttttgttagagacacactctcactctattgcctaggctggagtgcagtgctgtgatcacggctcaccgcagcctcgacctcttgggctcaagtgatcctcctccttcagcctctccagtagctgagactacaggcatgcgccaccactcctgggtaatttttaaatttttttagagacagtgttttccttatgttgtccaggccgcttttaaaattcctgggctcaagtggtctgtctgcctcggcaacccagagcattgggattacaggtgtgtgcactgtgcctggcctgtttttctttcctgtggcactaaccgcccccacagaggggaaagtaagcagtggagccctgggttgagggcggctgttgtaggggcagggactgtccacactgttacttctccactgcccgcctccaacataaccccatcgtgggagctgggtgaggaaatgcatgagcactgattcttcgcaggatttcgagtgttacacatgtggtaatactgctcacatcacttgaatctgcaatcccatgtgaagttggagtatgtggcaagaagcaactctgcgagggtggtgggtggaggagggaggggcccaacccacaggccaggaacccatgtgaggtggccgccttcctctgtctcttgctaatacctgggtgatgggctttatgcatcttgacccagaaaagagcgagtcacaatcgaccaatatgatggaggggatatcactgcacaccaggcaaatacaggctcagctgccaattcccacatccctctagccccttttgatggccagggaactttcttgcttctgttcacatgaaaacaacagttggccctacccatgtaacgaaggaaacacttacatactgtgtacttactacatgctgggcactgttcttaaacactaccagcactgcctgtataattctcccagcaaccctatgaggtggctacaatcattagccccagtttacagatgagccaatggttgcttggtgaggtttagccaattgcacaggcttgcacagccagtaagtggccaggccagggtttggacccaagccatgcagccccagagtctgtgcacttcaccacaatgcgacgtggcctagtcccaaggggaatggcttgccttgtaggcaatgagctgcccatcatcgtgggtgacaagcagaagtgactgagctagacaggggtctcctccacgtattcagtgtgtcccctgtgtgtagctctgagctaagcactctgccaatgccatctcatttcagcccgatgacaccactgccagatggaaccattattccactatatggatgaacaaactgggtttacagagattaggtaactggtccgagatctctggctgctgagggctggagctgggactcaaacaagtttgcttaatgcagatcccaagctcttcacctcttatcagggatggtgtccaatgagggttggctggactagatgacttttacggtcctagccaatccaagatcctgagggactgagagtctggcaagtaaaggggcacactcccctagttactagctctagctctcccctagtaactagttactatgccaaaaatactagtcatcacatttcagttcttttttttttttttgagattgaatctcgctctgttgcccaggctggagtgcagcggcaggatcttgactcactgcaacttctgtctcccgggttcaagcgattctcctgcctcagcctcctgagtagctggaattacaggtgcacaccaccatgcccggctaattttttattttagtagagatgggtttcaccatgttggccaggctggtcttgaactcctgacctcaagatctgcccgcctcagcctccagtttgtttgtttttcttttttttttttttttttgagatggagttttgttcttgatgcccaggctggactgcaatggtgccatctctgctcactgcaatctccgcctcccaggttcaagcgattctcctgcctcagcctcctgagtagctggaattacaggcatgcaccaccatgcccagctaatttttgtacttttagtagagacggggtttctccatgttggtcaggctggtctcgagctcccaacctcaggtgatctgcccgcctcggcctcccaaagtgaagtgctgggattacaggtgtgagccagtgagccgggcctatttgagtttttatgtttaaggatgtatttctcttactattttttttaacacagggtttttcctgaaaagttgcctgaggaacaaagagttaaataagacccttaaaggatcaactctctttgccaggcatctaagtcccctctggggctttgaggagacagtcgctgtctttcctggtggtaccaccaccttccttcattcaacgccgccgcatctgacaaccctgggcacaggaatctgcaccccaggtctccacggtgaatccagcagtcaattttcagagcttgtcctgcctgccccatccacaccgcttggcacatgggtcagcccgcctttacttaccttcttcatctggcttcccggatgtcacatctcttggtttttggttggtttttccagttggcttttccaatttatacctgcagcatggatctctcctctgaactccagatacataaatctgtctatttgacattgccttggatgtctagaaggcatttcaaacttagcaggtcccacacttagctcctaattgtcagtcctgcctccagcacacgcccctctcggtgttccccatcgcagtcgaggacaactgcattcttctagtttctcaggcctcaaaccttagaatcatccgagactcctgtctctcacatatctcatctgtcaacgaatcccatcagctctaccttcaaaatatgtccagaatccaccacctccactgctaacacctggctcactatctcctagtaacctggagggcactgtcttcagtctgatcttcacacagtagccgcagtatgaagacacagggtagaccatgcctctcttcttctccaaactctccagtgggttcctcctagtcaaagtcaaacctcacttggccctctagacctcacctctgcatcctcccgctggccttatctcctccacctctgacccttgctagctctatttcagctccaccggtctcctggccattccctgaacctgaaacatggtctcctaccccagggcctgtgcactggctctcccggtgaggaaaccgctctccttcccatctccaccggcgcgttgcatccttcacctctttgctcacatatccctttctcagagaagcttttactgaggcctctgctcaccctcttctcccctccacattccgtgtcttccttttctatttcgtttctctctatggtacttatggcttatgtaacaaactaatctattgtttatatatttatttttactgtttctctgtgaaaacgtacactcgaaaagggcaggagttttgtctgtttggatcaggctccacccctggaaggtaggacagtgttcagcacagcaggtgctcaataggtgttgttccgtgaatcagcacatcaattgcagcattgtggctaccagggggtcaggatgcgggcggtggagccctctggcctttgtgtggtagccgaggactctgtgtcagcgaccgttttccgggaaacttccgggcgagactcacatcttggaaattcaaatactcaatagctctcgaattctaggaatcttgagaagaggcctggattaaggattcagacgtgggccctcagatgggtgagaaacggggactctgtgtctcctagcggggacagaagggccaggtgacaggccaggcagagtggacggggcttgggcagggggcgggggcaggcagccacacggggcaggagctgcagagctaaagccaggccatgtggactggctgcgggtttcgctgcctagctggtggcattgagcaagttacttaacctttctgaacttccgttttatgattttggaggaaacagtcatagctttctctctggcagagtccgatggcccgagtcccgctccacagtgcgggtggagggcacggaggggtgtgtgtggggggcgacagcccaggaagtctagggggcggcagggcgcgtgggggcgggggttgggagaccgcagggaggatccccgaccttgtctgaagatccaagcaggcggagccgcggtctggtccgcggggtaggcggggcgcaagagtgttcccgggggcggggggccgacccgcgtctaaaggtttccgcgattcacccgccggcgcctggcctggcccagttgcaccacgagcgctgcggacactcggggcggcagtcggtctgtcagtcctcccgccaggtcccgcggcccgcacctgccgcccgcacctgcagctccgcacctgcggccagtgcctactgccctctcttgccgcccgcacctgcagccccgcacctgccgcttgcacctgcagccccgcgctctacccggttcaagcatggctgaccaggcgcccttcgacacggacgtcaacaccctgacccgcttcgtcatggaggagggcaggaaggcccgcggcacgggcgagttgacccagctgctcaactcgctctgcacagcagtcaaagccatctcttcggcggtgcgcaaggcgggcatcgcgcacctgtgagtcgggccttgggcggtgggccccgtcctgtctgtctgcctggggagcctgcccggcgggctgacgttgggccctctgagcctcctgccgtcagcctctgtctgtccgtctgatgtctgagcgcctctctcgctctctgtctggtagcccctctctccagaagctggctcagcctcactcaagtcctcatctcctcccttgaccttggaggggcccacctgggggtccgtctcacaggtgtacacctgattccatcttgcattcctcttctctgccctgagcagcctgcctcgtacccctctcagccggccaagtgtgggcacctggcctgcccgtcatacccgccctagcctcagacaggaaagtgctagctcaggtgccttccttccccatttcttctttgtcctccttcactctttctgcaattagggacccaagtcaggtttctaatccagttatctctgacctgaaacaagacctgttaggagcgagtgtcccccccgccccccccgcaagcaggctgggaggtctcctgtgtgtccagagcctttaggagcagcagggcttgtgtgcaaaggagctcccgtgggctgccccttgctgggacagttgccatgctgtgccagaaacaggaaacacccagggcttcaaaacccctatcgatttgcaatgatggtgtgtgcagcctctgcccaattagtggaaagctcaaaagtggtttgtagaatggttctgaatgcgctatggagtgcatctcgaacgtcactgggcacaggaatcatttggggatcttggtaagatgtgtgccctccttccatagctctgggacaggtcctgagattctgcatttctaagaagttctcctgtggtgggtgctgcccatcagatactgtttgtctactcatcacattgtgagtagcaaggggtcaagtggagtggagactcaaaggaccccttcttgtgaggttttttgtaagtcacacaacatcctttcgtttgtgttggtgtgcacaggtattttctttttcttttctttttttttttttttttgagatggaattttgctcttgttgcccaggctggagtgcaatggtgcgatcttggctcaccgcaacctctgcctcccaggttcaagcgattctcctgcctcagtctcccgagtagctgggattacaggcatgtgccaccatgcccagctaattttgtaattttttttagtagaaacggggtttctccatgttggtcaggctggtctcgaactcccgacctccggtgatgccttggcctcccaaagtgctgggattacaggcatgagccgccgtgcgcaggtattttctagctaactgatccacacttttaactgaagtgtaactgggttttcagattgtccatacactttactaacattccccgcacttatgcacactataaaaatgacacatgatgggctgggcgcgtaggctctagcctgtcatcccagcactttgggaggccgaaacaggtggattgcctgaggtcaggagttcaagaccaacctgatcaacatggtgaaaccccgtctctaccaaaaattagctgggtgtggtggcaggcgcctgtaatcccagctactcgggaggctgaggaaggagaattgcttgaacccaggaggcagaggttgcagtgagccgagatcgcatcattgcactccagcctgcgcgacaagagcgtgactttgtcttaaaaaaaaaaaaaaaagacgcatgatgctcagagctgacctgaacaaatacaaccctgctacttgggtttggaatgcatttctccattcttaaaaactcttctccgccccgcatcctgcaatctagattccttttcttactggcaggctgtctggctttggtcccacagtatggactggtggaggtaattcatgtaaaggagtggtatgatcacatttatttttgaatattaagcagacatgttaaggaaggtgatgactccattactgttgcctctggcccctcttaataatacattcctaaggattcttattttagaaacatacccaggtgaaatcttaagctttaatttacagctagtataggtggctcacagctttaactgcctttgaggaccagggatatattttaaaaagagggcttgtcgactgggtgtggtggctcacacctgtaatcccagcactttgggaggctgagacgggtagatcactcaaagtccaggtgtttgagaccagcctggccaacatggtgaaaccctgtctctactaaaaacacaaaaattagccaggcatggtggcaggcgcctgtaatcccagctacttgggaggctgaggcaggagaattgcttgaacccgggaggcggaggttgcagtgagcccagatcgtgccactctactccagcctggcgaccgagtaagactctgtctcaaaaaaagaaaaaaaagggcttgtcatgtctgatattgtttaaaaaatgtgtcagtacctttcacacccctagagagactgagaaatgtaagatgtgttttgaggtgtcccactgtctaagtaaccttagacagtgggaccttggatagtgagattttgatggtggggcctggatgaagcatgttaattttggctacgtaaggtatgcgttttatttatttatttattttgagatagggtcgcactctgttgcccaggctggagtgcagtggtgtgataatggctcactgcagcctcaacctcccaggctgaattggtgctcccacctcagcctcccctgtagctgggactacaggcatgtgccaccatgccggataatttttgtgtttttgtagagatggggttttgttatgttgcccaggctggtctcaaattcctgggctcaagcgatctgcccaccttggcctcccaaaatgctgggattacaggtatgagccactgtgcctggccaatatgtgtacttttatactagatagttgtgaataccaggttttaaagaaatactatgttgcactcattgacaaaaatttaaaccattcaaaagaattcaagggaagagtgaaacccaccccctatatatcccatggggtatccactgcaaataatttactgcttatttttccggatactcttttacagtcatataagtttacacatgaacacatatttacatatgcctataatagcagacaaaatgggatcacaatacacatttctgtagtttgctttgttatttaacattattcaagaaacatccattaatatcgggacatctacatctacctccttttaactgctgtgtgctgctcccctgcacacatcatgaggtattgaagtttttctctattttggggcactttggtttttactagcctttgggtattacagtgctgtacccttggaactggtgtgcatgcctggttgttggggtagctgacaggactagatgctggacactgaggtgatcttgtgggaagttcagcgtttggccattttcagtatcacatgtcatcaggcaggtagcatgattctcaagccaggcccccaacctacattcattccaggcattgaaatccagaaagaaaaaccagcattcctgcaaagatcttgttagtgctgaagaccggacctagaagagcatgtacccagagggacggggtgattgcagatttgcaggaacctcactggagccagtttagggagctcacccaggatcattatggaaacatcaggagtttaagcacagagcctggtgtaacctaaagttgctattgtagtcactttcattgctcctgttaaaatgttcatggaatcattgagttttagactgaaagagactcaacagtcagctagtctatcacctcctcatacagaagaggaccctgagaccgaggaagatgagatgacttggcctgtggccgggatctcaggaaccccggattggaggtcttttggccacactacacatctcttcctttattttttagaaatcaattagaattcaccaaactctaaatctcatctattagttaactggtttttttttttttttttttttttgagacagggcctcactctcactcaggctggtgtgcagtggtgcaatctcagcttactgcaacctctgcctcccgggttcaagtgattctcctgcctcaatttcccgagtagctgagattacaggcgtacactaccatacctggctaatttttgtatttttagtagagatgggattttgccaagttgaccagggtcgaactggcctcaagtgatccacctgcctcggcctcccaaagtgctgggattagaagtgtgagccactgcgcccggcctaatttttgtatttttagtagagacagggtttagccatgttggccaggcgacatttttgatgtgaattcaggcttagataccaaggagtcattgctttgggcaaatgtgccctgggagacttccctctgggcttctggctccctccatccactcttgggagagaaactgtgcagatcagaacagtctgcaacttgaagtcaagctgatgaagttgtggttcaaatgtcaaattcgagtgttgtccactttgcattcctttgggagaaagtggtgctccagtggcttcaggttttttgttttgtggagttgacttccctttgtatccatttccaaatcactgactgaagaattcactgatttcattcaattaacaaaatattactgaacatccaccatgtacaaagttccagaagacgagaacaacacagagtttactctgtaggaaaaaatatttgtatcgttctaacacgcaatagaggttttgaaagatgctttctttttctttcttttttttttttttgaggcggagtctcgctctgttgcccttgctggagtgcagtggggcgatctcagctcactgcaacctccgcctcccgggttcatgccattctcctgcctcagcctcccatagctgggattacaggcgcccaccaccaagcccagctaatttttttgtattttcagtagagacggggtttctccatgttggtcaggctggtctcaaactcctgacctcaggtgatctgcccgccccggcctcccaaagtcctgggattacaggcgtgagccactgcgcccggtctgaaagatgctttcgcggtggctcacgcctgtaatcctagcgctttgggaggccgagtcgggcggatcacgaggtcaggagatcgagaccatcctggccaacacggtgaaaccccgtctctaccaaaaaatacaaaaaaattagccgggcgtggtggcgggcgcctgtaatcccagctacttgggaggctgaggcaggagaatgttgtgaatctgggaggcggagcttgcagtgagccgagatcgcgccactgcactccagcctgggcgacatagggagactccgtctcaaaaaaaaaagaaagatgctttcatagaggtgccaaaaatacgattcatggtgaaggactgtggagcgccaagaatgggcacgtgcaggggaagcaaaaggcccggcggctggaccgcagttcaggctggaggtcacagggggaggagtcctgaggtgggaaagtgtttctggaaaagttgcccactcaatttgaccaaagcatggagtactcatggtagggcgttcgtggatgtgaaattgtgggtacattggggaagcatcaaatggcaagggtgaacactttacacttttgggggtatagaaaaggagagatcaaggattttgaaagttttttgagtggggcagttgcgtgactggagacaaatctggagaaggtgtggctggaagtatatcggaagagcgaaagataggatatgggaaaaccagtggcaagggggagccgtcagttgagtagccagcagagctgcagccttggaggggagaggaaggatttggaagaagtctgagcatggattagatgagaagggctgtgagggagtttctgaaatcgctggtcctagcaattgaatgcagagcccatgccaccacaaaacaaaacaacacaaaaacaaaaacaaggaggagctggtttttagtctggggaaggagggaagatgatcccaacattttggaaacgctgaacttgagatgttagagggtgatctgttgggagatgctgtccagctgcaggctgttttgcctgtctgttttggcacgcttgccctgaggcagagaaaagaggaggagatctggaccagtttagcagacaggaatgtgcagggattcagagcacgttttggagagagatggagccaagcttagattcctggccctgccattcaacgtctgtgaggattgggctgttgatgtgacatcactgaacctgtttctccaattgttaagatggagacagcctcagagactcgtaggaggatcaattaagtttactaattgggtaccaatgttattaatatcattgttttcctgaaggctatatttctttatttttcagacagagtctagctctgtcacccaggctggagggctgtggtgtggtgtgatctcggttcactgcaacctccacctccaaggttcaggtgattttcctgcctcagccttccaggtagctgggattataggttcctgccaccacactcaactaatttttgtatttttagtagagacggggtttcactatgttggccagtctggtcttgaactcctcacttcgtcatccacccgcctcagcctcccaaagtgctgggcttacaagtgtgagccaccgtgcctggtctattttattttcatttttttgtaaacttttatttgcatgttttgttcttcatttcttagcagtagcctgtatgctatcagcagggagagagtccaggctagcatgttacatattagaacaatgttgcacccaagagtggctgcaggaaatgtcctcccatcagactcatattatgtccagaagagttacttttatatatggggtcctctcagctgtttgacagaagaaataataaagagcttcagatttcgttttagaatgacacgtcagctaatacacgtttaggcttatcttccaatttgcagtttttggcattaagcttttagaaactttaccagatttattttatgtttcttgaattctcttctccacatgaccaaggagtgaaattgcaagtttgtttgcataaaagaagcgcagacagccacgttccatcctgtttaccagtttaggccccggtgaatgcaagcagaggcaggtatttgtgacctttgaaagcagctctcactagcacctcttcaatgtatttctgaacctttggatgttcctggctgggcaaatggttgattaccatggaatcaagcagtaacaagccagtcttacctttgactttagtgataaggattaagtaataatctccctcccttttggttgagctgcgtgttccgagcccgagtctggttcttctgtgtgctgtgtgaagtgttgctgctgcaatcgtgttactcagtcacagtgacttcgggaggagatggtcctaagtcagcagatccaggcagccctggagggctctagttctgtcagcccctggctccaatccttgtgtccttcagtgttttagagatgctgtggaaggcagcctcccccaatcatcacaaatctgcatgttcagtgtcacaaagtccatggctgtgaaatggttcattctgttttagaaaccatttgtaaacttggaaaacaatgctaaaatttaattaaaatatccaaggatttcaaaatactggccacattaatctatgcttctaaggtgttctccatcatatgaattaaaatgacttagagctctttaaatttttcagtgggatttacagtaaaagtaaagaagagatattataggcagtttctccagttgagttctgctccccaaactccaggaagagctccttcgtatctctggggctggaaagggaaaggacacagagacttcaaccctgcctggtgcttttccactttacttgggctgcagggccaactaatttgaataaaattgaagtgaaatgtcaagaacatctcaaataaataatattcccagtgagattttatcaaatgtaaacttggagcacttttttcttcttttgccagttccttattggctgtcctccaagaagttgcctgcaaaactggtttagagatacctccccttcccccaatccccagatcaacccacacttacttagtggatgcctgcggggctctattgtcatgtggctgccttggtggggagtactatgaaccaggtgcaccgcgcgcattatccatgatccccacaaacatggccagaaacagccactcaggggctttgcacaacttgatgtcacatcatcagtaagaagcaaaggcagaatttgaactgaggtctttctggtgctgagttcttgcttctccgcatggttgtgttatgccaagggagctagaggtggaaacggtaatatttcttgcacacttgcctatgcaccaggcacttttctgaccactttacctgtatcaactcagttatgccccctctctgtagactatgaagcagacacactacattcccatattgcagatgaaccagaggtcacagatgctaagtgactttccccggctgctgagcatggagcagagctgggattggaaccctggtggtgtagagtgccagcctggggccttgaccattacactctagtttcctgaggaaccgggtgaaaggccattgcatttgtctaacgctaagtttgcacagcaaacacacttttaccaagaagctatgctaatctggagggtttttttcaggagttgggagtgttggatggtagaggttatgcaggcaggcattaccaataccactgggtctaatggagtttatgatcttaggaattcttggatccttttattactctctaaatttattcatccatttacattgagaacttactatgtgcaggcattgttctaggtgctaaggatacatggtgaacaaaatattcttttttccaggatcaagactgataggtctttcttcctccagaggcacattcagatgtgccatgtttatgtaagagtttcggtccccttggagtatacactcggcatttacctggtgccctgtacttttgcttcagacctcactagaaaaacctctggctgcctgtaaggttctaatttcgaatgtcccaggtagagggctgtgccatcctcaggatggcccaacaggtgaggtgagctcagaggccctccactcttggcattcttgtacaaagcaggttgggcccaggcctcttaagatcgaggttttaggtagcatttccaggggtggcagccctgtctgtgccctccctcccagtggctcttagaagagagtgggccattcctaaggccatgaagacaatgccccataaaggtcatgcttccatgcctgagggctctcccggtcctctcttggtgggggttgagagactagaccctcccccctacctccccaggagtgggggttatgtgatgtcaccaatgctggtgtctcactcttgcacacattttccaggctcctggcaccatggaagatctcctggaggctggtgccttcagcttcaggctctgatccttccttgttgctttaattatccgtcttaccacccaaatcaattaacaggcttcctagttaacaggcttccattttctaggccaaggcttgagaggtgaattagttcttccaagcagctgtggttttatttccagaagcgcccccatatcaacagctgtgcctattcaatggccatggatctgtgaagggcacgagcaggactcatgctaatcagctctgctttttctatattaaaaaaaacctttggccaggtgtggtggctcacgcctgtaatcccagcactttgggaggccaagatgggcggatcgtggggtcaggagttcgacaccagcctggtcaacatggtgagaccctgtctctactaaaaatacaaaaattagccaggtgtggtggcaggtgcctgtaatcccagctactcgggaggctgagacaggagaatcgcttgaacccgggagggggaggttgcagtaagccaagatctcgccattgcactccagcctgggtgacggagcgagactctgtctcaaaacaaacaaaaaacaacaacaaaaagcctttaattgaaattacccaatagattgcatgtaatatatacttgttttataaacttgatacaacatagaacgagattttaaagtatttaaatatagtgtgaatcatgattagtgtttcctcatcattgttctctttgctattctcaagaaaatctcagcttcaacttggatatatggaaaccaaatatccgggtctctggaacagtgcaatttaaaagcatgtcctagaattttcagccgtggtttgaaagccacctattgattcacacatgcctggaagtagctgacatttgtgcaacactgtgccctgattcggctggggctctggggttctatgcagcccgtttggcctccttgctgtgaggtgcggggcatttaaattctgttgccaacagtagcggccagtggtgctctggcctcagcaggtgccctgttctcttgtttgctgcctgctacttctcaaggaaggcctcaagccactttgctccttatgctctgacatttctcctcttaggcccaatacagaaaaggtggagaaaacctcacaatgttgcctttcccctctatgataaatttttttttttttttttgagacagagtctctgtggcccagtctagagtgcagtggtgtgacctcggctcactgcaacctttgcctcctgggttcaagcaattcttgtgcctcggccttccaagtagctgggattgtaggcatgtgccaccacacctggctaatttttgtatttttagtagaggtgggctttgaccatgttggcaggctggtctcgaactcctgtcctcaagtgatccacatgccttggcctcccaaaatgttgggatcacaggcatgagccactgtgtctggccacctctgtgataacttttattcagaaaacatttccttggcagatcaagtcactggctcaatcaaaattgcccttcctgcccctgcatgatcagcccccaactgctactgttgactccttttctggcagtggggctgaggggcagagcaggggagggaggtaggggaagggagctaggcctggaggtttacatctggctcagttcagcccatgtcttggccatttcacctgttcctctcctttaattgtaaggcacagttggcctggggagggcttttttggacagggtcgtgtgatggtttcccatatccctccagcctcatttgctgccttttcccatccctagagaatggcaaattgggagctgatctagaagggagctgggtggtgtgtgcaaggctccagtcgagtcccacggagggtagttggtgtcatcacctctggttcacagctgcctcctggaaacgccttccaaggcaggatggtcttctggatccactgggctctcctggagtcttcctagaacttcagacgggggatggcagccgctgcattcgctagggctcagggctgtctcaccaggagctgagacccacacctgctattgactctaggctgctgagcccgccctctctaggtggtgattggaatatagagtgaatgctcttgttaatctatccttcagggccattcaggaatgatgactgatcagcaggcagacatttataatttcttttctttttctttctgaggtggaatttcactcttttttgcccaggctggagtgcagtggtgtgatctcggctcactgcaacctccgcctcccgggttcaggtgactctcctatctcagcctccctactagctgggattacaggcgcccgccaccacgcccggctaatttttttttttttttttgagatggagtttcactcttgttgcccaggctggagtgcaatagcgtgatctcagcttactgcaacctctgcctcccgggttcaagcgattctcctgcctcagcctcctgagtagctgggattacaggcacatgccaccatacccagctaagtttgtatttttagtagagacagggtttctccatgttggtcaggctggtcttgaactcccagcctcaggtgatccacctgcctcagcctcccaaagtgttgggattacaggtgtgagccaccgcgactggccaatttttgtatttttagtagagatgggatttcaccatgttggccaggctggtctcgaaatcctgaacctcaggtaatccgcctgccttagcttcccaaagtgctgagattacaggtgtgagccactgtgcctggccagacatttagtatttctaagggggcttctgaaaacttatggagaaaataaactgcatgtgatcttcagctaattaagtccttgagcttgtttctgaggactttttcctctctcagaatcacagaagccttgcctgcttgccacttttcattgacctgtgtaaatgtgttactcggggaaatctcaagcccttcttagggtccccgaggtgtgacgggggaggcttgatggagcctgcgtctggtcctgactgctcatcatggctgtgcagccctgacaggactaagccagggtggtgggaccagcacggtgtggccagcttaactcactgcggctcagaggagacctggagacatgagggacacctggacattgttgctatcaacatggcagcatagttggctggcagccgggggaatttattctcttgacccactgtttctaccttaggatccttttcctgtgcttttctggaagcttttcctaacgccaggattaaccaggagaagccttccctcaagatatcttagcaaagttataaagtacgtgaacattgagttggagcagcccagagtaatctatcttcatgtgttctcttacacttcaaagacaactggaggatagctggagaagggtccttcctgctagaagaggggagggacgcttactgggggtaaagagaagaggcgttcccaagaaaggggcaggaaccagcttaacgcatctgtcaccacccagcggggtcatggaaacgcaaagcaggtggagcccatttcctgccgtggtttggtggacgcaggcagccccatccatgcaggtgctaaaggccctgtgtggcttggtggatgcaggcagccctgtccatggaggtgctgagggtcctgcgtgatttggtggatgcgggcggccctgtccttgcaggtggtgagggtcctgcgtggtttggtggacgcgggcagctccgtcattctttctttttgacggagtctcgctctgtcgcccaggctggagcgcaggggcgccatctgggctcactgcaagctccacttcccgggttcacgcctttctcctgcctcagcctcccgagtagctgggaccacaggcgcctgccaccgtccccggctaattttttgtatttttagtagagacggggtttcactgtgttagccaggatggtctcgatctcctgacctcgtgatccgctcgcctcggcctcccaaagtgctgggattacaggcgtgagccactgtgcccggccccagccctgtcagttctgtggcgagggcctgcatggcttggtggatgcgggcagccccgtcagttctgtggtgagagccccgcatggcttggtggatgcgggccgccctgtccatgcaggtgctgaggaccctgtgccatgcgtccttgcagagtgctgtgtggccccacaagcctaccatcgtgaacggtgtaccaccccttctgtggccctcagcttctctgtgttggttcctctgtgtgccaagggtaggagccatctgagactcttggaatggcagtggggagggctggctggtggtcatgatttgctaagtcacccaccctgacactgactgtaacctctcgtaggtctgggcatgatctggggcaacagaagttgcttctcactttaatctggccaactgctgagtctgcaagctcggaaaatgcagtccactgcatgaggaaatagcctactttcatttaatcccacaaaacaagtcacggtgcccctgtgtttgggacacagttacaggataacttgtctgtctctgggtggtggggctggcccaggagtactgcaaatcagagccatccttacaaggactttctccctccggtctcctctctctgaatttagatgcttcctggatccaggcatcacaggaaaaagacctcaggctttacaaaattacttgtataaatgtgcacatagtacccactcccttccatttggaaatatgtgaaaaatgtacttactgtttcctttggctaaattgctaacaaacagctcttctctggagtcattactagctgacttatttgggcttctttagggctttttcatttcctcccattctttcttttttttatttttttgagacagcgtttcgctcttgttgcccaggctggagtgcaatggtgcgatctcggctcactgcaacctccgcctcctgggttcaagggattctcctgcctcagcttcccaagtagctgggattacagacatgtgccaccacgcccagctaatttttatgtatttagtagagataggacttcaccatattggtcaggctggtctcaattttctgacctcaggggatccacccgccttggcctcccaaagtgctgggattacaggcgtgagccaccgtgcctggcccatttcctcctgttcttttttttttttttttttgagatggagtctcgctttgtcgcccaggctggagtgcagtgacgcaatctcggctcactgcaagctccgcctcccgggttcacgccattcttctgcctcagcctcctgagtagctgggactacaggtgcccgccaccatgcccggctaattttttgtgtttttagtagagagagggcttcaccatgttgatcaggctggtctcgatctcctgacctcaggtggatccacccacctcggcctcccaaagtgctgggattacaggcatgagccaccgtgcccggcctatttcctcccattcttacgaaaaacattcaaagtaccattcagcttgaatgcccccctagagatcttcctgaccatctaaattaaccatctagcctctcatctccctctcctgtcaccttgtttttgttttatgtcagcgagcatctgtcactatctgacatatctttttcattccaaaacacttatttatttcttgtttgtgctcaccccagtagaatatacgctccacaagggcgggatctgatctaccgtgttcggcactgtaaccccagcatctagaacggttccccgtgcacagcaggtccctggtgaatatttgtagaataaatgagcactcagatagctgtctaggaagattttgagtaaaagagaccacatggcctgaatgttcctgagggaagtgcctgagcagatgggacttgggccaaaaggtaatataggactttccttctgcacctgcctcagtgcctcatccgtgtccagtgccttcggcccctctgcccagccctcccggccccccgagctgtccctgtcaggctgcacctattagtgctaggccttttgtgtatgtcatctcatgcaatcctctgacagccgcgtgggggcagacttcacttccctctttggacacatgtgaaagggagggaggctcagaaagagcaggggagcctgggagctgaggcctggacctggtctctgccttgaagcccttcttctggtccatcggtgctatttgccctccggaatcagaagtgagtttgacagtgggctgggcacggtggctcatgcctgtaatcccagcactttgggaggctgaggtgggtggatcacttgaggtcaggagttcgagaccagcctggccaacatggtgaaaccctgtctgtactaaaaatacaaaaattagctggatgtggtggcatacggctatagtcccagctactcaggagggtgaggcacgagaatcgcttgaacctgggaggcggaggttgcagtgagccgagatcacgcaactgcacaccagcctggacaacagagtgacactgtctccaaaaataaaaataaaaataaaaataaaaataatcataaagtgactttgacagtgcaactctcaggctggaaaggagagagcactgctgctagtggggtcaccgagggagctgcatttgagctggtgggccctgccaagtccctctggcctcccagattttggctgccttcttcctgcacaagccccagcctcacaattggggtcagaaaaagatcatgtggaaataggatcgaaagcccagggtacatggggtggagctcaaagctcgatagacatcttggtcttttactcatgaaataggagtgatgggtgaaaagagaagcagcaggaggagggctggtgggatgagatgtgctttgcaggctggaaagggaatgatgccaagagtggctgaaagacgctgacaggcgggcccgagaagacagccggagctagctcctgagatagtcaggccggaccaggcatgtgggtttggatggtttctaggaggggctcagttttgcccagccagtcacagcgagttatgttttgggcaaatgcacttgcaggagctgaagcagtcacggccactggatcagggaccgtcagttcccaggcgagcgcacatcgccatcatggccaagggcgcgggtgtgcccttaccacccactttcagaggcttgctggtgtcttcaaagacccatcttttccccttcccacatcaaggctctcgccttgctctgtgcatccttcctgtgagacgtctccctcctttctgtgttcagggcaaccccaggctatgacaacctgccgcttctgtaagtctaagaagctaggctgcgtttagacaagccactggattctgggaattctataattactgacttgcaggttgcttaaaaatagtgaaaactccaggatccctgcaacttccatgccctaggactcctgccaggggcccagggtgtcaccaagagagccctggcctgggagtcataggcagggtctcgcctccaccctctgcctgggagtcataggcagcgtctcacttctaccctctgcctgtgtggagaagtccacaggagtcttgggtctgagttttctcctctatgaaatgaggcagaggggccggttgatgctttgtttcttttagggtctttttagttataaagccataaaccccttggcttggctcgcaactcaggctacccccgacccaggcttccttgcttgctgggtctctctattgattcgtttaacccgtgtgtttgggggccaacactggttctttctgggcaaaaccaaaaacacccgcaaactttttatgtaaaaagcactgagacacatactgcaataaacagatatctactatatctgtagtattaaaaatatttcatgggggagtatggttgaggaaaaaatgttctaaaaagctccctaggggaatcataatgaaaacaaagttaagaaacactgatttaaccacaaaagtgtgcagggcaccatgacaggttcgaggtgaagaggcagatgatagtatctcctcctctctagggtctgtccagaccttcctgccttgttctcccaagctgatgtcctccttcctttcttctaaatatatatatatatatatttttttttagacggaatcttgctctgtcgcccaggctggagtgcagtggtgcgatctcggctcactgcaagctccacctcccgggttcacaccattctcctgcctcagcatcctgaatagctgggactacgggcgcccgccaccacacccggctaattttttgtattttttttttttttttttttttgagacggagtctcgctctgtcgcccaggctggcatgcagtggcacgatctcggctcactgcaagctccgcctcctgggttcacgccattctcctgcctcagcctcccaagtagctgggactacaggcacccaccaccacacccggctacttttttgtattttttaatagagacggggtttcaccatgttagccaggatggtctcgatctcctgacctcgtgatccacccgcctcagcctcccaaagtgctgggattacaggcgtgagccaccacgcccggcccttttttaaaaaaattattattatactttaagttctgggatacacatgcagaatgcgtaggtttgttacataggtataaacatgccatggtggtttgctgcacccatcaatctgtcatctacattaggtatttctcctaatgctctccctcccctagtccccagctccctgagaggccccagtgtgtgatgttcccctccctgtgtctatgtgttctcattgttcaactcccatttatgagtgagaacatgtggtgtttggttttctgttcctgtattagtttgctgagaatgatggattccagcttcatccatgtccctgcaaaggacatgaactctttcttctaaatcttaccgaacactcacttttggtgggtttatggactcatctacatgttctggtggtcatggcttattttttgtggcttttgttccctgtagctatggcattgctggttctaccaacgtgacaggtgatcaagttaagaagctggacgtcctctccaacgacctggttatgaacatgttaaagtcatcctttgccacgtgtgttctcgtgtcagaagaagataaacacgccatcatagtggaaccggagaaaagggtgggtctgtacttccaccattgagggttttaatgtagccggtcttcttcccagcttcataattgactccacttgttcagctgagctgggtttctgggagtccctctagatccctgctgtggtcttttcatagcttccacctcactgctgccatctctcgaatcctccctgagccactgtgcagatgagtgttgtggctcacgccgccttctccccagtggactcccacaaactcatctccatttctaactttttattgccatgtttaaggctcttcaaaccctggcttctgttggtcacctcttgtactacatccctatccaccaaattcctgaccttcacactgaccctcctgttgacctagactgcttgaaacttccatccctgatgcacgcattggagtccctattggtctgtctctgcttcttttttttttttttgagacagtgttttgctcttgttgcccagtctggtgtacagtggtgtgatcttggctcactgcaacctccgcctcctgggttcaagcgattctcctgcctcagcctcctgagtagctaggattacaggttcccgccaccacacctggctaatttttgtatttttagtggagatgaggtttcaccatgttggccaggctggccttgaactcctgacctcaagtgacccgcccaccttggcctcccaaagtgctgggattacaggtgtgagccaccacacctggcgttatctctgctttttgagagcagaaaatgaatcttatttgtctctgtgtcccagtgtctagtgcaatgcctggcacattggagggcctcaacaacaaatgactgttgaaaaagattgttaaatgaaagagtattcccagcttttataaaacaacaattgtaattagaaaaaaaaacttctgagattagaagtgcagttatatgggcttactatctttcccagtttgagaggaactgggaacatgaaggagtagaattaggaaaaaacaatgagaagatgaagaggctgcctgtcctcaccctattaagagggcaggagccacatctgatgaagttgtttttcatcattcctaaaatagccgtacatgccagacttgaagttcatgtttttctcagctgggcctttcaaggtctttggcagctttaggcgtatggcttagatttgttgtttaatattctccatcactcacgccggacttctcttgtctatcatgggccttcatgataggcagcttcctgtgttccagtttccagttcctcctgcattagtgagggtggtctgtgaagagcaagagggcagggaatcatgttaatctgctacagacatttaaaaacgacattgtaaagtggctaatttggagatggaaaactcccagtgatgtgctggtaaactgggtctcaaagcaaacaaacaagtctctgatatgtccacttgcctctgtcaatggtgtgaatactctcccatcgttgattttaagctaccaatgtgatatcactgaaggcagagttgggaagagatgtgcaccgttagctcctgagagccgataccagccagctcctgcacaccactgaaaatcccactcaaaacaggaatctgcggtattcccactaccactgaaagttatctactttgggaattacgctagaaatttgttttgtttagttttgtttttagagacagggcctcattctgtcacccagactggagtgcacagtcatggctcactgcagcctcgaactcctggctcaagtgatacctcctgtctcagcctcctgagtagctgggactacagatgtgcagcatcatgcccagctaattgaattttttttttttttttttttttttttttttacagaaggagtctctctatgctgcccaggctggtctcaaactcctgggctcaagcaatcctcctgtcttagcctcccaaagtgctaggattaggcatgagccaccgtgcccagccaggatatttttgaaaactctatgcaccccaacctcaaggggcatctgtaagacctccatgagaagtttcttatagatctcaaccctagcaaagtctctgcttcacctaaggaattatttttttccttacaaataaaggaaaatgagtgactaaccttctttttcctttggctgccaggaaactcaatgcaaaattatgatttgattatatcaacaatataggaaatcatgacttatctgtattccattaccttcatctgcacctcttaagtggtattttctctgtttaatggtcttgtgtgtatgtgtgtgtatctgtgcattctgtatgccatctcatgccttccatgacagtacaaataaataagacccacattttttgaactttcttctaaattcccattcttagcccctaatgtatactcctttagtgtatcttgctataacattttaaggttgtatttcttttttctgtgctcagggtaaatatgtggtctgttttgatccccttgatggatcttccaacatcgattgccttgtgtccgttggaaccatttttggcatctatagaaaggtaaaacgtgatatcttaagcacttggtttggggacagaagttaagattgagcatccagtcctatttcactgtggcagagcagccggagtggagatcatgaaactgtgagactgaagtagatttgtatctcaagttctgagcttttcagcactaattgcatgacgaagacccactagattgttgaaagagaatatagggtaaaatatgggtgggaagagaaggatatttcactctttttactatgtcttactttttatgatagaaaatgagatttaaaaaagaggcagtagagggtaagtatagtgatgatacgatgtgaactcagagttgagagtgtaagacaacaatagagactatgtcaaaactgtcctttaagtcccctagtcaatggtctataagctatgagccccgggctgagtccagcctgtggcctaatgtgtacagcctgtgaacaaagaataaccatttttacatttttaaatagttgaaaaaaactaaagaacaaagtttcgtgatccattttaagttttactcttcacgaatgaagctttaattggcatttggtcacattcattttttcacatactgcctttggctgattctctgctgcactgtcaaagttttgtagttatgatagagactgtatggcccataaaactgaaaaatttactatctgtctgtctgtagaaacagtttactgagctttgctctaagtcgtagaaagcacacagcataggatgagaatccagccctgctcgggtctcctaacacctgactcgggcagtcacccctcctccagagctgctttttctgagagagagagagagagagaaagagagagagagagaggagagagaggagagggaggaggaggaggagagggaggagagggagagggagaggtgctcaattatacaaataagtgaaaaatagaatgaaaacccatccacccatcaggaaacatgataaaatccaaggtacatcctcttagctttagctcttgttttgttttattttttcaaagtatatattttaggccggatgcggtggctcacgcctgtaatcccagcactttgggaggccgaggtgggtggatcacaaggtcaggagattgagactgccttggctaacactgtgaaaccccgtctctactaaaaatacaaaaaaacagccaggcatggtggtgggcgcctgtagtcccgggaggctgaggcaggagaatcgcttgaacctgggaggtggaggttgcagtgagccgagatcacaccactgcactccagcctgggcaacagaacaagactccgtctcaaaaaaaaaagtatatatatatatagttttaacagctttggggggtacaaatagtttttggtgacatgaatgaattgtatagtggtgaagtctgagattttagtttatacctcacgagaatagtatatattgtatccaatatgcagtttttttatccctcatcccctcccatcacccccttctaagtctccaaagtctaccataccattctatattcagctcttgtttatttcagaactgaaacctcacaggctggaatcgactgaagaggttggttcagctgaactctgttctaggacacaaaggcattaacttaagaactgagacccttggcctagcgagatggctcacgcctgtaatcccagcactttgggaggccgaggtgggcggatcatgaggtcaggagattgagaccatcctggctaacacggtgaaaccccgtctctactaaaaattacaaaaaattaactgggcatggtggcgggcgcctgtagtcccaggtactcaggaggctgaggcaggagaatggcatgaacctgggaggtggaggttgcagtgagccaagatcgcgctactggactccagtccgggtgacagagctagactccgtctcaaaaaaaaaaaaaaagaactgagacccaaatttgcactttatctctaaaagtgacttattgtctagtattatacataatttcctttcaaatatgtgaaaagtagagcccccatggcacagttatctttggtcattggaacgtattttgctttttatcttgggtaagaggcagatccacatcacaatcagtttgaggaatagaagattcaaattctcatactagaaaggcaaaaaggcaacaatttatccattttccaagtcatgccaaggaacataccatttctgttgtagacatggaagaatgcaattttccttgcaaaatatcaaatccacagaatagcaggagaggtttgtagcaaaattcttccttgcagaggaagacatctggctaatgtgttaaccacaactaaagcagtgttgatgtttactaagcccattctccatctcagtccccccaaataatactttttaaggaaaaaaaacctgggaaattgagagacattggctatcaactaaaaaaaaaaaatcaagccagcttgcaacagcagcttgaattatgaatgacagaattctcaacaataaggctcggctgtcttctcaataaaccagaagtgacttttttaaaagacagaaagtggggcctggtgcggtggctcaccccggtaatcccagcactttgggaggcccaggcgggcggatcacgaggtcaggagattgcgaccatcctggctaacacggtgaaaccccatctccaccaaaaatacaaaaaatcagccgggtgtggtggcaggcccctgtagtcccagctacctgggaggctgaggcaggagaatggtgtgaacctgggaggcggagcttgcagtgagccgagatcgcgccactgcactccagcctgggtgacagagcaagactctgtctcaaaaaataaataaataaattaattaattaataaaaagaaagtgatgatgagtatgacacagacctctaagtcatttcagttttttgaagccttattgattgcttgaaacagctgaaaccagttgagggctcatgaggcataaacatagacatctataatgcttccaaggggatttttcctgctttctgcagagatgattgttggctagaatcgcaccatggtgcccacgcccagtggggcagcatcagtaactgtgaccctgccatggtgaccaggccttgctacacgattcctggaaaggcacgtggaaggatgtgtggtcatgttgcatgcagctcctgccacagcatctttccagggcctaccgactactactatttcttttttgagacagagtctctctctgtcgcccaggctggagtgcagtggcgccatctcagctccctgcgacctctgcctccctggttcaagcgattttcctgcctcagcctcctgagtagctgggactacaggcgcccaccaccacgcttggctaattttttgtatttttagtagagacggggtttcattgttttagccaggatggtctcgatctcctgacctcgtgatccgcccacctcggcctcccaaagtgctggaattacaggcgtgagccaccgcgcccggccacgactactactattctttctctttcttctccctgtccctcccccttctccctccctcctcctccccctgctcctcctcgtcccccccttcctcctctgccttcttcccctcctccttctccctcctcttcttcttccttttcttccttcttcctttttctttctttttttctttttttgagatggagtctcctgtgtcgcccaggctggagtgcagtagcacgatctcggctcactgcaagccctgcctcccgggttcacgccattctcctgcctcagcctcccgagtagctgggactacaggcgcccgccaccacgcttggctaattttttttgtatttttagtagagacggggtttcaccgtgtgttagccaggatggtggcaatctcctgacctcgtgatccgcccgcctcggcctcccaaagtgctaggattacaggcgtgagccactgcgtccggccttttttttttcttcttttttttcttttttttgagacaaggtctcactctgtcgcccaggctgagagcagtggcgccatcatggctcactgcagcctcaccctcccgggtttaagccatcctcctacctcagcctcctgagtggctgggactacaggtgcaccaccacacctggctaatttttgtattgtctgtagagacaagggggtctcgctatgtttcccaggctggtgttgaactcctgggctgaggcgatcctcccgcctcgacctcccaaagtgttgggattacgggcatgagccacggtgcctggccccaccagtgtctggctggagacatcctgacagggcgaattctcctgcaaagctgggtaaccatcatggtttgtccaaatattgagttgaaatctgtttcattttgctcacttggctgtttagagcataagaaaataagattctttgacatgtttggaaacagtgtttctgccctcccaataatgcccaccacacccactttttttccctttaagctgaacatctttcacaggagagggatctgagacttctctctagcctgatcaccctctactggacatactctaacttgcaatgtcctttacagctcccaccacaaaagcagagattcagaaaagtagggtttggtttctgctccgaggaaagaccactgtggacgtgacagtctctcctcccccaggccctccgtttctgtgcctacttctccttatgtgatgacatggaataatatgtgatgacatggagccagtgcctacagcaggtggtggcctcagataggcagagaaaggaagggtccagaggtttctgattttgccaagtgctccgtgctcattggtccctgggcatctgcaggagaatggaatatgtttcccttggaggaaaggcatgcattgctgagcatttggaggaaggaattagaaagggggctgatcccagctctttgggaggctgaggcaggcggatcacctgaggtccagagttcgagaccatcttggccaacatggtgaaaccccatctctactaaaaataaaaaaaaaaattagccaggcgtggtggtgggcgcctgtaatcccagctacttgggaggctgaggcaggagaatcacttgaacccaagaggtggaggttgtagtgagccaagattgtgccactgcactccagcctggcgatagagcaagactctgtctccaaaaaaaaaaaaaaaaaaaagttgggggctgggctagaaaagaattcctccaaatccatggctcagtgggataattttctcttcgttttgagtatgtgggtcatagacaagtattactattattttttattccgtgcgaggaagtgtataaatgtagagcatttggtgaccgtatgtcagggaagggctgtttacttttgcacctttgccacaggccggcacggatggttctgggcgaggtgaatctctgggaaaaggggcctttattggcagagaactggttacttgaagcctgcagtgggaggagaggagagttagagtcctgagtccacccactgtgtacctggcttcaagggaagctggtgattgttaaaatgagcctctgacaggcagcgcatgttgacaaaggccattaatttcatttttcaaggttgtgcattggcaaaacttggaattattccctcaaagttttgatcctgtaagtttagtctgtgtttagctccactgtactgtctggtgaatacaaaccaaactgaatcaaataacccagtgcaaccagctaactaaccacctccccaggtgaaaactaggaggggcagggaagcggtggaaagaaatgggtttgtggttttctggtttgtggttttctcatttatatgagtagttgttatgcttgaatgtgaagttcttacacttgagtgtgaaggtcaccccttcacattgcatagtgcaatgcagattctcaggccccgccatggaaagtctgacagtgtgtctaggctgtagccccagaatatgcatttcttttctttttcttaaagaggcaggttctcattctgtcacccaggcatgtgcagtggaatgataatggctcactgcagcctcgacctcccaggttcaagtgatccttcagcctcagcctccttagtagccacaggcacatgccaccatgcctggctaattaaaaaaaaattttttttcgtagagatggggtctcccagtgttgcacaaactggtctcaaactccttgcctcaaatgatcctcctaccttagcctcccaaagtgctgggattatagggatgagtcatgaccccggctgtgaatgtgcatttttaataaatatcccaggtgattctaatgcaggtgctctgtgggccacccttttgaaagttatgggaagaaattacctggaatgtttttctgggatgacttccttctccagctgcgtgatacagatgcccctgcttacgctcagctgcaggaatctaggaaaagaataagtgaagttcgagaaattgcatatttttatttctgcttaattcaagcagagagtagttaagctgaaagatttgtttggggctgtcttgatgaccaaagaggtcaatccagtgttaataaagaagatcaggctgggcgcagtggctcacgcctgtaatcccagcactttgggaggccgaggcaggtggatcacgaggtcaggaaatagagaccatcctggctaacacggtgaaaccccctctctactaaaaatacaaaaaattaactgggtgtggtggcaggcgcctgtactcccacctacttgggaggctgaggcaggagaatggtgtgaacccgcgaggcggagcttgcagtgagccgagatagcaccactgcactccagcctgggcgacagagcgagactccgtgtcaaaaaaaaaaaaaaaagaagaaaatcattaatagtaagaaatcagtggttaggagctgtctccttaaggggctcccttccctagtgttagaaaaactctggaccacatgacccagtgggctgtgtttttaatgaaaaaatggattacggcacatgccacgttctaagtgtaggtattattttggtaactttttggtgtgtgtgtgggggcactggtttgtgatgtaaaatgtgcttcttcccatgcatcacggttaaaacactggacagcatctgctctaccccataatgactctggggagatattctgagttcctacgtttctgagaatttccctgacgtgtgagtgatatagaccacatgctcagcagagtatgggctgcagcggcaagagctcacaaaactgatttcctccgcagactggctgccctgcagcccagtgttaatttatttaaataaagatggagtaggcaggtgacagagatggatgcccgtaataagattaaattagtgggaactggcaagaaggcatgctcttttttggaactgatagtggagagatgagggaatatcacattagaaaaattggaggagggccctaattggaaagaggaatccagatgcaggaaatctgggttctggtgggaaggctgccgtgataatctaatcaggatattgctgatgtgtaggggaaggcccctctgggaagatgccctatttcattagaagagcaccttgagaatgcctcctgttaatggttgaactgtaaaaaagaatcacaaaacaaaacaaaaacattctttgatttctttcttgctctagaaatcaactgatgagccttctgagaaggatgctctgcaaccaggccggaacctggtggcagccggctacgcactgtatggcagtgccaccatgctggtccttgccatggactgtggggtcaactgcttcatgctggacccggtgagagacctcacaggaggctgggggcttggctggtgtctgtgagcaaatgaatgatatgtgtgggggattggcaggggtatgtggaggtgggaggtgatgcccatggagggacagagatgatgatgtgtggtggaaagagggcaggagaccaagagagagtgtatgcctcccgagcagactatggaggtgagaaatgccatctcagactggcacaagagggggtctttgttccaatgtgaattcctcagagcagctgttactcaaatgacccaaatgccaggtccaggcaggccatagggatgatgaagtgtgctggggaaggaaggccggggggcaagggtggaactggggtgaactgaagagttccagcaattacaattgggaggagggggcccgccttgccaaggcttctattaatggttcaagaaacactggattgtaaaaaacataatgtttctgcatgtgtgcaacactatgttggccaactaaaatgcatttatggacctgatggggctgtagatattctgtttgccataaactgtatccatccatttctagcttttctactttagtcaccaaaaggctgttttcctgagacgaatgggtgtgccaactgaagcagtggacgacattgcttcttcaaaaatagctcccacatttattcgtgtacatttacacaaaccttcagttaactggtgcagtctttctttcttttttttttttttttctgagatgtagtcttgccctgtctcccaggctggagtgcagtggcgtgatctcggctcactgcaagttctgcctcctgggttcgagcgattctcctgcctcagctcctgagtagctgggactacaggcgcctgccaccacacttgtatttttagtagagacggggtttcgccatgttggtcaggctggtcgcgaactcctaacctcaggtgatctgcccgcctcagcctcccaaagtgctgggattacaggcatgagccaccatgcctggccaacttttttaacttttagagatgtcctcctatgacattagtgaactatgtgtaaagtgctttttgctggcaaactgaaccccaggaacagacaaggaataggaaccttctgtgcgagataggctgctggaggtgaggccgggtctgtgtgtggcaggaaggctaactcaacacaggctgcctttgtcccaggctgtcagggaagtggactttcacctccttggaagcatgggcacttaacaaataaacaagggtagggtaatagcactagttaaagtcgccaaatgtggtgacctgggtaggggtggggtgggggagttagtggcagaaccagagcaaagttccacctgagcccaggatggaatttcgggcaccactgatgtttgctgactgtgatttgccgggccctgactgcttcccattcttctggtgccttctcttgttacctttgagttggtggaagcagagaaaacattcaatcccttcttgtttccagattgcaggggagcatccctgtagggaagcttctgtgtgtttgatagtcttttgccctcctcagtcctgaatgtttggaagcgcaatgcagggctgctgggatttgattccagcccttctgtctgcggtgcctgacggggctgagcctcccgccagggaggtgctaagtgcttcctctttgtttgcgcttgctgcaaagccaggctgacggtttctgctgaaaacactgctacagctgtactcgggtttccagcggcttcaactttctgggagcttttatgttttgtctctgtacacagacttccctcctttgcaccatggacagtctggctgggccctgcgctctgcacccagcaactgttgtgagatggctttcttttctatatagttttttgaaagacatttatttatttatttttctaccaacgataaaagaatattccggtatacttgtggtcaaaaattttgaaaatattaaaaaaggcataaaagtaagaaagaagaatcacttccagtgacacctttcaatggccactgtgaattctcccctccctttctccctgtctgtctggtttcaacgtattccatatgggtaggaaccaatttctgctgtggaataaatggctaggtagagaggtgtcggtgggccttttttcttttcaactcttgtgtcaacgtcaagcccctcctaaatgggcagagcctcgatcaccctcttgccaaaaacacacaggaacccataacaatcctcaatccggagcaataggacttctgcaacacttttcccccaaattcaaatctcctttgaagagcctaaagcttaaaggcataagcttaaccctgggctatgtgggaagaggcagtctgagaaaaacttcacacgccagcgagcaaaggccatcggaagttacgtacgccagactcaaaactcagggttctactttgttctataagaacgcccagaaaggagaactcccatcaaggtagaaatgtaaagccgagaacagcgctgagcacttgggtgtaactcagggactgatcctgcggtggcccgtctctcctgagagcccacctcccgcctgaaccaacccttttttctgtttggtaaaggcatacacatcttatattgctttggacacacggttcttactctcttgcaggcttagcagttgtttcacaagtctgctctccctatttttgtgtggtttctttcttgtttgactgaaatcatatgcaaacaaagtcgaaagtgtctgttatcaccctgatggcttctgcagcattgtcttgcttcccctcaccccattcacagttcccagagagcctggcaggtgtctcggggccccaagatgagtggtgcccgtgcgccgcgaccccagcccagcgtagcccagcccatcgctcgcctcatccaggcctgggggacccagtgcgctcgtcatctctccacctttccttccttgtctaaaaaggccatcggggagttcattttggtggacaaggatgtgaagataaaaaagaaaggtaaaatctacagccttaacgagggctacgccaaggactttgaccctgccgtcactgagtacatccagaggaagaagttccccccagtaagtgagggcccggggagggtggtgcaggttctgggcatctggcaccagaggccgttctggaggcaggggcatcccccggagatgaaagggatccttgggatcgagggccttgggcctcatgtggggctcctgagcagtgtggaaatctattggttgatgacttaccctaaaggtgaaaggaagcagggatggagtggattgggcttccgtctacactgagcccacgatgaagttctcacctcagtactggagactggaattctcaccctgagacatcaaaaatcagtctccatgtcagcctttgctactttctcttggcagaagaaaattaggataataaagttaaacaaatgaatgaattcatggcagtaaaacatcttcccttctggggtccatggtcccagatgggatgaaatgtggttcccccactcaaatgcccgtcaagtggtgtctgccccttgctaggcctgcctgaggtgcatctatcagttatctcgagaccgagagtgcccatcgtgacatctccctaaagaggttacaagctagtgaatatgaagagaagaaatggctgtgtggagcttgctctatatggaatatctgattttgtcctttctttgtttaaaagccatcgatggctgctgtttgctagagatgaagctcaaatgtttgcaggacgttcaaggaggcctcagatctgccccaggctctctctccagcttactcatctctcctttcaccttatcctggattcccctcctgcccccaagctccgcacacgcacacccgagtcccgcaggctcctcctccaggaccatatccctctccacattgctaagcagacacttgtgcagtttcctctcctgtaaattacacactgcctcccacccctgcccggttccttagcttggtaacaaactttctcagcctttaaggtgttactaaatggtacagtttctgtaatgcctgcctcagccccataaccagaatcaaccataccctcgttggggcttctgtgggtaatctgacctattgtgagatgatgagaggctgtctccatttttccattttctatttattgggaacaggattctcatcacattttttagcacagccccaaatacataccttgtaggtgctcggtgaatggatgtggaatcaaagaaacttaggagacaccaagaaaactctctttcttattttctgcaatcctaattcttgctggtcttaacttgcaggataattcagctccttatggggcccggtatgtgggctccatggtggctgatgttcatcgcactctggtctacggagggatatttctgtaccccgctaacaagaagagccccaatggaaaggtaagggtgtcccctggagagggagtgaggagcagatttcacttgcagcccacgcgatttagtttaggaagaagaaaggttttgctagctattacgctccatgctaggttgctacgtgtgtctgtagcatattcttttgtggattaaaggtaaagccagacgatatcaactaaagataaaaatagtctcttgagagcccttccagtgctatggcaaaagagaatgaacggtcaggacgaggactgaaagtccttagggcttccagtggatacagggcttggctggggcaaaatgaattccattcataaagtgaaatgaaacaacccagcctcacttccaaggcagcgaatcaaatgtgtatcctcagtagaagtcttctttgattgctttcaaaaggtgtaaaacagaggtaactagtgagtcaacatccactacttggaaaacgataccttttaggggaggaaagaatctctggggaaacctagagctttcaggtgagccgtcaccaccgactcactagtccaagcccatggtgttcccagcaggctgcagggtggctgtgctccctcacgctcgctcagagctgccctgctttccttctgccagggtgacagtgtgcttccttcccaagtattgtgtccttcttatgttttcccagtggacagatggctttttaggcagagtcttactcgtcgcccaggctggagtgcagtggcgcgatctcagctcactgcagcctctgcctcctgggttcaagtgattctcctgcctcagcattctgagtagctgggattacaggtgcccgccaccacgcccgactaatttttatatttttagtagagacggggtttcaccatgttgaccaggctggtcctgaacttctgacctcaagtgatccacccgccacagcctcccaaagtgctgggattacaggcatgagccaccacgcgtggctgcctttttttttttttttaatgcaagaggagaacaggaacaacagttcccttaaacacaaaacctgtgtgtttggatgtatttgggtctgtttgcagcatgtggcatccagaatgaaggcatttctatttactgaaaccatcatccagctgtagctgcctcgggcatatcaacctgtgtggttagcctgctttccagcacttttctctaaagtcccccgaaattgttcctgaacacaaatattgaggctccttcttttttttttggtttttcaaaactagccatgacacctatgtggaaatagactcaggaaacacctgcagaaagctgtcgctcagtaggcagactgcatgaaaaggcatacaataaaaaagttaatatttaaaagtgaatgccaagacgtataatacactgaattccaacccaaaagccttcggagaatcgtaaaaggaatgcacacagagttgcaaacaatatcacactgtttggaggagccggtctgctttccagatgtctgtagccagacaccaccatggattttttttattgcttttagaataggcgaagctccatccaacacacacagaatcactcattaagtccagtttccatggtataaagagaaggcaatgatcgcttctgccaaaatgtcattctgtccagtatgcaggtggtctgtctcacatttgcatcgggtaatctattgctggcactggcttgatgaatggttgaatttaaccaaatggttaactgttttgtctcagatgcaacctggggtgggaggaaacttttacagcctcacaggaaggaaaaatacagtattcgttcccttggaaactcccaccagctctgcatgttttgctgcagaaaagtctcttttttacgcaataccttctgatacaaggaggccgctacccggtcttgttttccagctgagactgctgtacgaatgcaaccccatggcctacgtcatggagaaggctgggggaatggccaccactgggaaggaggccgtgttagacgtcattcccacagacattcaccagagggcgccggtgatcttggggtcccccgacgacgtgctcgagttcctgaaggtgtatgagaagcactctgcccagtgagcacctgccctgcctgcatccggagaattgcctctacctggaccttttgtctcacacagcagtaccctgacctgctgtgcaccttacattcctagagagcagaaataaaaagcatgactatttccaccatcaaatgctgtagaatgcttggcactccctaaccaaatgctgtctccataatgccactggtgttaagatatattttgagtggatggaggagaaataaacttattcctccttaaaaaaagtctcccttgctttgtgtcaaataataatgatgatgacaataataactgctgatgcatataacattagataactcatttaatcttcacaataacccaatgaatcagatactctgaataatccattttatagatgacaaaatggacgaggagaggtgaagtaattggctcaaggcttccagccaatgagtggcagtgtggggacctgaatgcaggcagcctggccactgtgagccagcatacggcttctccttcatgtcgtcccgttcaggcctggcccatcattccccagccttgttcaggattgcagctgaggaaccatgcagcctgaacatggcgactcacgccctcctagaaatgggggagctaatggcttagtggtggtacctgcatgtgaccctctggcctcccaaacatggatgtaaccatctgaatcccaagtgaaagtttactgtttacccagtggtgatttttctttttctttctttctttctttcttttttttttttttttttttgacgcggagtcttactctgtctcccaggctggagtgcagtggcgcaatctcggctcactgcaacctctgcctcctgggttcaagcgattctcctgcctcagcctcccgagtagctgggataacaggcacccatcaccacacccagctaatttttgtatttttagtagagacggggtttcaccatattggccaggctggtctcaaactcctgacctcatgatctgcctgcctcagcctcccaaagtgctgggattacaggtgtgagccactgcgcccagccacccagtggtgatttttctataaaagcacggcacttaactcacaaaggctaatagttcctacagtctagttaccataagaaaaaggattcactacaagaacagggtttaaggaaatgcaatttgttgcaagcaagcaggcttctcactaaactctctatagaaacagtttctccctccgctaaccctggtcttactggaccagagtccaagatcgtggcaagctctgtcaggcactaagtaacacctgtggccctccttgagctctagatataaaatggatctatccatatgattccacttgggaactgaaaacatgtgtgtatgtgaatcctgcttcttcccctccaaacactccccattcatttcacattttcccagcaggaaattgatcttgagcattggatctgcttctgcccactgaccagacagacccaaagccaatatttctccactccagctggggctgccctctgggaaagtcccctgacgcacaaagcacctcttgagttttaaacttcttgtaactcagctggcatctggttctcaaagcatgaagggagagaaatatggtctgggagccttttccatatatatatatcagggtgcagtggctcacgcctgtaatcccagcactttgggaggccaaggcgggcgggcggatcacaaggtcaggagatcaagaccatcctggctaacacagtgaaaccccgtctctactaaaaatacaaaaaatagttgggcgtggtggcgggcgcctgtagtcccagctactcaggaggctgaggcaggagaatggcatgaacccgggaggcagagcttgcagtgagccgagatcacaccactgcactgcagcctgggcgacagagcgagactcgtctcaaaaaaaaaaaaaaaaaaaagaaaaaagaatgagggtctttgcagatctaattaaagtaaggattaagatgagatgagcctagattacctacattaggatgggtcctcctctgaagccatgcatttttgtacaggttcatgacatggcaggagcctggaggcctaagccaccgccatgtcgatgtcagcctgggaccagaaggagagacaaacctttgctgtgctaagccgtggggatttcaggtttatttgttgctgcacgataacatacgctatcctgactaaactagaccaagcttggcaatatttttaacctctctgagtctccctttcttcatttgcaaaatgttaattgtaatatctattgtagtcaaggccattttcatcataggtaacagaaacccatttattctgctaaagcagaaaggcaatttgttggaaagcttcaggggactctcatgaaacctagcacccactgctttcctaaccccgaggacacacccttagtccgtcctggcattgtcagccaatccactgtgtctccatgtctcacaccaagttccccggagaaaaaaacctgacgtcttagcttgtgtccagttagctgcagccatagacccgggtcatataagacaaacgtggccttgggttttctttttatgggcagggcacgcctctctcttagatggggatcgtgggctgagcagataccctaaagggtctgccgtgctggaagcagaaatgctgaggtttcatgaaagagcgtttgttgagatcactggagacggggcatggaaggcattctaacagagttttgctaacagagaatatgctctcagctagtactgtagagtcacagtccagatcctagacttcaggtgggggccccgccctatgaactgccctaagactgccttactgttcagagactctgtttgtccttactacttccgcccaggcctgtgagggcctttcaccaagcacagcaagcccataaatagctctgtgatcaccaatgcatcagtggcgctgaaaaaagcgtgagctggacgctgccccccccttcctctgggccttccagatgccccgtgtgtccacgctgttgtgtgccctgaaagaactttggcatttgctgaaaggtcaccagctgcaatttcagatcatgtaggtaactcgaacttccaacatttaaatgtagctgaaaggggcatgacagctgcacaggtgccagcctgggctggagggtggcagaaatagcaggccctcccttggatccctttacggggggagctgacttatacatggcactggccaatccccctccctcctgatccccaaattatccaggcttctgctcatccttgacacccacagtgccggacaaccggcgcctctcccagagatctgctcataacactggcttgtttgtttcacttccaatctgttgtgaacagatatgttaataaaacataataagccgagcgcagtggctcacgcctataatcccagcactttgggaggccaagacaggcttatcacctgaggtcaggagtttgagaccagcctgcccaatatcatgaaaccccatctctactaaaaatacaaaaggtagccaggcatggtggtgcgtgcctgtagtcccagctactcgtgagctgagatgggagaatcacttgaacctggaagatggaggttgcagtgagccgagatcgtgccacggcactccagtctgggcaacacagcgagactctgtctcaaaaaacaaaacaaacaaaaagcataataaaaataattacaggagtggctaataagcacctgctcaacatcactaatcattaggaagatgcaactactctaagccacagtgagataccacctcacacccattgggatggttactgtaaaaacaaacaaacagaaaataacaagtgctggcaataaggtggagaccctgggactcttgctcactgctggggagtgtgaaatggtgcagccgctgtggaaaatggtgcagcagttcctccagaaattagacagacaattaccatatgatcctgcaggtccacctctgggcacatccccgagagaatcaaaagcagggccttgaacagatgtttgcacgctgtgctcatggcagcattactcacactagcccagaggtggaggcaacccaagcggccatagaggatgaatgggtgaacagactgtggcgtgtccataccagggaatgctgttgagcctcagagaggagggaactctgacccatgccacagcatgcggggatggtgaggacattgtgctgagtgaaataagccagtcgcagcaggacagatactgtatggtctatgagggacccagtgtagccaaattcatagagacagcagaatggcgggtgccagggactaggtgttgggagggggaatggggagttcttgtttaatgggtacagaatttcagtttgcaaaatttgaaattgggattatgactataattggggtctagaactgttctatcatgcaaacccccattgccctgtcccctccccacacccctacccctggcagccatgagagttatctgtccccacaggtttgcattctggagagtcccctacaaatggaatgagactgtagatactcgctggagaccactgctgtcactcagcacaatgcctctgagactcgcctaagtgccacacgtgacactagtgtttgtgttgttaatagtattccattgtggccgggcgcagtggctcatgcctttaatcccagcactttgggaggccgaggcgggcggatcacgaggtcaggagattgagaccatcctggctaatacggtgaaaccccgtctctactaaaaatacaaaaacaaaattagccgggcgtggtggcaggtgcctgttgtcccagctactcaggaggctgaggcaggagaatggcgtgaacccgggaggccgaggtcatgccactgcaccccagcctgggcaacagagcgagactccgcctcaaaaaaaatagtattccgttgtatggctctcccagtgtgtttacccattcactgttaaggagattttgggtgtttgcagtttctagtttaactagaactgctataaacatctgtgtgtgggtttttgtgtgaatacacattttcagcattgttttgcgccatcacaggggaaaccttctttttttttgttttgagacagagtctcgctctgtcgcccaggctggagtgcagtggcacaatctcagctcactgcgagctctgcctcctgggttcacgccattctcctgcctcagcctcccgagtagctgggactacaggtgcccgccaccatgcccggctaatttttttctgtgtttttagtagagatgcgtgttagccaggatggtcttgatctcctgacctcgtgatctgcctgcttcggcctcccaaagtgctgggattacaggtgtgagccaccgtgcccagccggagaccttcttaatcagataacattagcttcaaaatgaaacctgaaaactaatcaaccaggcctccgtcttcaccctgcagtcatttactggaccagaacttggaagatccagccactctgtttctgtagtgatgtcaaaggaatcatcattggtttccccatgtgaaaggcaaagcttatttgttaatggcaacatgacgtgttaggatcaaggaaaggtccattccgcagttttcacaattcccagagctcttgggaaaggaagagttttccaagtttgatcctcatgatatcaaaattaaaatgttcttacccaaaaaatgataactcctgttattagcttattattattattaaactgatactgagtgtcagatggggtgaacagattaatacaaagtggcatctctatttagatgagtctttcattaaacaggaacacacagagtaaaacacactggaatggccctttctccagcttccaatagggaagttggattgattattatgttggcagtggagcaccttccagaagaaacatgagctagaaatgatacccaagtctttaccttacccttagcaactgacagaagtgaagccattgcagaaggctctcttgctaataactttttttccccagcatatttctcaatgtgacagtattgttctgaatgatgaaggcaaccacttttcatttggattcagaaacacttggaagcagtgataatatgtcttttcttttcttcttcttcttcttttttttttttgagatggagtctcactctgttgcccaggctggagtgcaatggtgcgatctcggctcgctgcaacctccgcctcccaggttcaagcaattctcctgcctcagcctcctaaggagctaggactacaggtgcacaccaccatgcccagctagttttttgtatttttagtagagatggagtttctccacgttagccagtatggtctcgatctcctgacctcgtgatccgcctgccttggcctcccaaagtgctgggattacaggcgtgagtcactgcacctggccgaaaatgtgtgtttttaaaactaagtgaagataatacagttagggatcatgaagtctaatcccattttttttttttttgagacagactctcaatgtcacccaggctgcagtgcagtggtgccatcttggctcacggcaacctctgcctcccaggttcaagtgatcctcccacctcagcctcctgagtagctgggactacaggtgcacgccactacactggctaatttttgtatttttttatagagatggggtttcaccatgttggccaggctggtcttgaactcctgggctcaagtgatccccctgccttggcctcccaaagtgctgggattacaggtgtgagccactgtgctcagctggatctcatttttaaattgaggcatctgagtcccggagggctttgattcccggcccaggcttctttcctttgggtatagatttagcaatactctggtctgacccaggcagatgttcttgttttattatacatagcgatctctcttgttagaactcaattctaagctcatgtcttattctatgttctaattgtgttaacaggcatatgtgcattgtcgtgtatggtgctcagtcatctagggaggaggagcatcctagaatgggagaaagtatcatataagagaaagaacgctaacctcaggtagctctgggctgagattctagctagtagctgtgttatccctaggaagccctagtttcctcatctgtaaaaatagcactactggatcaaataattgggtggattaatgtgtgccacatactgagatagaggtgtcatctgtctccatctatccattcacctcagtgttgaaagttgaaatagattgaatgaaaatcacaaaaagggtatgggatcctgtatttgttctattaagaggtagcatatttcttggtaagtgaagatagacccccccacacccccgcgaaaagaattagaacattgtcacatagcagttcctcttctggggttgtatcttactgaagcacttgccccaatataaggatgtttgttgcattactatttgaggagccaacttacctaaattatctgaatgtccgcaagctggaatgatccaagcctctgtgtgctgacttggacatcttcccataatatttgctttctggaactaaaaaaatatataaataacatatatatatatttgggatcttaaacctgcatattaagatctactggtagatgttagttttatctgaaagtttccacataaattgtgagcaccaatgcccatctcaaccatttggttgccctcctcaaccagtttggttgatccaatgccagcgcccagctcccactgcaggcatcaccacacgaccctgatctggcagacgctgtgcacagggacgtctacgggggtgggaggatgggttccagggaaactgttctttcttaataaaaaggaactgatgtggttggagctgcccttgctcccctctttgcatcttcaacgtgggccagatgttcagaactgcagtgacattttgtgcccccaggatgccaagcaaggggcacaatccagccgaccaaggatgacagagacgagacagagaggggtcccagtggaaccaagaacagctgaatgaacaccagccaccacctcctagtgcactcctggtctatgaggaaataaacccccacgtgtaaattgctctagttgttctatttcttgcagctgaacacattctaatcgacataactgtcaggggaaaagaccttcagagaaatgtgcatgttgtactgttttgtgaaatgagattatgtatgattgcacaatagttgtgagcacattgaaagactggaagggcggctgggcgtgatggctcacgcctgtaatcccagcactttgggaggccgaggcgggcggatcacgaggtcaggaaatcgagaccatcctggctaacacggtgaaaccccgtctctactaaaaatacaaaaaattagccaagcgtcgtggcaggcgcctgtagtcccagctactcgggaggctgaggcaggagaatagcgtgaacctggaaggcggagcttgcagtgagccgagatcacgccactgcactccagcctgggcgacagagtgagactccatctcaaaaaaaaaaaaaaaaaaaaaaaaaaactggaagggcaataataggtaacaaagtactgagcacctactatactaggtacatctcattgcagccactctataagatggatgcttcacggttatgctcatttaagagtgagacaactgaggttccaaggggtttaataactttctcaaatcatgcaaccaacagatagctagcttgggactcacagccaggtctggctggccctagagaaagtgcttccaccaccatatgcaccccaccagtgcctactggctgcacagaccgccaccagccctagcagcagtgatttctggagagtgggatgggagaatgggctggtggtgaggaggtttgtctttatccacttctttagtgtttcctttttaacaagcaatttttgttacaaaagtggacatccagagatattgacaaaataacactggtgccaggaactgtgctaggaatataatagttttcttccggatctggatctctactgtggatatccactggtcatacatgcctactggaaataaaaagcattctttcctaacttattccaaaccctggctaaaggaattctggggttgccattatgttactatgtgacctacgtcccagataaggaacctgcgaatctgccacctccgccctcgggagagccaggccctgcagtcactatatgtgaagaatcctttggagcctggaataagagggttttatgcatcattttttaatcaactggatttctcacctcccacctgtgcctaaatggtggcttcttggtatcttgaaagggggtgctcagcaggagaaagcagctccatgtttctgggcagcccgtcctatttacagactgctgcggctccctggcagctgccacagtccccgaggccagagggagttccttgagggccccagcagttgtttgagtcatgtgttttgggcccttttccttagagatcctggcagggccagcacagatttcttatcggcttccacactgcggagctgcagccctcagaagtaagcaaggtttcctgccgggagaaaaggatttgaagcattccagccaaaatgacggacagaagccccttcgaaaccgacatgctcaccctgacccgctacgttatggaaaaggggcgtcaggccaaagggactggggagctcacccagctgctgaactcaatgctgacggccatcaaagccatctcctcggctgtgcgcaaggccggtctggcccacctgtgagtcctggggagcaggcatggggcacagagcaccccaggcccaggcaggggtgtgggagctgcaggtgctttggcaagaaactgggtccaaagcttattggccctgtgtgccctagatggaagctgcatttcaagttcctatcatgtgtgctttgataaaggggcctttgacttgttttgagaaaggaacgaaaacatgctatgaagaaatacacatataatttttccagttattataatgataccaagtgcagtggcttgttgcattaaaatatgtattgtgttatcatgacttgtacttgcacagagagagtctcactggaacaaagaagtagaggggtgacgtgaaatatctctttatgccttttgcagacatgagtgttttattgtaataagctttgcaaatatgttaggagctggaaattatgtacgacataggaagcttggtagagccccttcctgcatctgc

SEQ ID NO: 1656 - DNA, 1814 bp, Homo sapiens
cagtcatagctttctctctggcagagtccgatggcccgagtcccgctccacagtgcgggtggagggcacggaggggtgtgtgtggggggcgacagcccaggaagtctagggggcggcagggcgcgtgggggcgggggttgggagaccgcagggaggatccccgaccttgtctgaagatccaagcaggcggagccgcggtctggtccgcggggtaggcggggcgcaagagtgttcccgggggcggggggccgacccgcgtctaaaggtttccgcgattcacccgccggcgcctggcctggcccagttgcaccacgagcgctgcggacactcggggcggcagtcggtctgtcagtcctcccgccaggtcccgcggcccgcacctgccgcccgcacctgcagctccgcacctgcggccagtgcctactgccctctcttgccgcccgcacctgcagccccgcacctgccgcttgcacctgcagccccgcgctctacccggttcaagcatggctgaccaggcgcccttcgacacggacgtcaacaccctgacccgcttcgtcatggaggagggcaggaaggcccgcggcacgggcgagttgacccagctgctcaactcgctctgcacagcagtcaaagccatctcttcggcggtgcgcaaggcgggcatcgcgcacctctatggcattgctggttctaccaacgtgacaggtgatcaagttaagaagctggacgtcctctccaacgacctggttatgaacatgttaaagtcatcctttgccacgtgtgttctcgtgtcagaagaagataaacacgccatcatagtggaaccggagaaaaggggtaaatatgtggtctgttttgatccccttgatggatcttccaacatcgattgccttgtgtccgttggaaccatttttggcatctatagaaagaaatcaactgatgagccttctgagaaggatgctctgcaaccaggccggaacctggtggcagccggctacgcactgtatggcagtgccaccatgctggtccttgccatggactgtggggtcaactgcttcatgctggacccggccatcggggagttcattttggtggacaaggatgtgaagataaaaaagaaaggtaaaatctacagccttaacgagggctacgccaaggactttgaccctgccgtcactgagtacatccagaggaagaagttccccccagataattcagctccttatggggcccggtatgtgggctccatggtggctgatgttcatcgcactctggtctacggagggatatttctgtaccccgctaacaagaagagccccaatggaaagctgagactgctgtacgaatgcaaccccatggcctacgtcatggagaaggctgggggaatggccaccactgggaaggaggccgtgttagacgtcattcccacagacattcaccagagggcgccggtgatcttggggtcccccgacgacgtgctcgagttcctgaaggtgtatgagaagcactctgcccagtgagcacctgccctgcctgcatccggagaattgcctctacctggaccttttgtctcacacagcagtaccctgacctgctgtgcaccttacattcctagagagcagaaataaaaagcatgactatttccaccatcaaatgctgtagaatgcttggcactccctaaccaaatgctgtctccataatgccactggtgttaagatatattttgagtggatggaggagaaataaacttattcctccttaaaaaaagtctcccttgctttgtgtcaaataataatgatgatgacaataataac

SEQ ID NO: 1657 - protein, 336 aa, Homo sapiens
MADQAPFDTDVNTLTRFVMEEGRKRTGELTQLLNSLCTAVKAISSAVRKAGIAHLYGIAGSTNVTGDQVKKLDVLSNDLVMNMLKSSFATCVLVSEEDKHAIIVEPEKRGKYVVCFDPLDGSSNIDCLVSVGTIFGIYRKKSTDEPSEKDALQPGRNLVAAGYALYGSATMLVLAMDCGVNCFMLDPAIGEFILVDKDVKIKKKGKIYSLNEGYAKDFDPAVTEYIQRKKFPPDNSAPYGARYVGSMVADVHRTLVYGGIFLYPANKKSPNGKLRLLYECNPMAYVMEKAGGMATTGKEAVLDVIPTDIHQRAPVILGSPDDVLEFLKVYEKHSAQ

SEQ ID NO: 1658 - DNA, 100803 bp, Mus musculus
  misc_feature (1)...(100803): n = A,T,C or G
aggtaactctagctccagaggacacagtgccctcttaagggctctttgggaactgcatgcatatgtgcatatactcagacacgcatagttttaaataaagtcccaataataagccaggcgtggtagtacacacctgcaataccagcacccagtacatctccagagtccacctcacacagaagccagacaagaggctggagatggcaacagctacactgttagagctatgaactggggatgacccaaatgtctagcactaggaaaatggatgaggacattgtgggttatcatgtacacctgtgaagaataaacaagaagtgtgcatatctgagaggctgtgtctcagttacttttctattgctgtgaggagatatcatggccaagggagtttatgaggaaagcatttaatatggctaatggtttcaaagagagtctgccactgccacggtagggtagggagtgtggcagcagacagacaggcatggtggtattggagcagtagttgagaggtcacaagttgaagcgatgtggcagagccaactggaatggtatgggcttttgaagcttcaaaaccttcgcttagtgacatacctccttcaataaggccataccctcttcagtaggccacaccttcttatccttcccaaacagttccaccaactggggaccaagtattcaaatatatgaacttatgggggccactaccacacaacacaagcccagaaaacaaagcagttgcagaaaaaaaaaatcctttatatacatacaaacatggatgcacccaaacattaatatataagttgctatgtatgtttgtgtgtgttgatttttgnnnnnnnnnnnnnnnnnnnnnnnnnnnnnnnnnnnnnnnnnnnnnnnnnnnnnnnnnnnnnnnnnnnnnnnnnnnnnnnnnnnnnnnnnnnnnnnnnnnnnnnnnnnnnnnnnnnnnnnnnnnnnnnnnnnnnnnnnnnnnnnnnnnnnnnnnnnnnnnnnnnnnnnnnnnnnnnnnnnnnnnnnnnnnnnngacccatgtgatgggatgtgagaatgaataatgcaagttgttctctgacagcccctctatgcgcacacacacacacacacacacacacacacagaggagaaagagagagagagagagagagagagagagagagaagctgaaataatgcacataactacacgttgatatgtactcacacataaaaacaaacaaatgtaattgtaaaatagagggttagggaacggagctcaattggtagagtagttaacatccgccaatctcagatggatggtggtacatctctgtagttcaaacccttgggagatggaggcaggaggatcaaaagctcaaagtctgagaccacactgggctacatgagcccctgactcaggaagaaagtaggaaacaggacaatagaagcaccagttctcctttacatggtgtcgacggtgtcactggagctggaaaaagacggggactatagccagttgaagcactccaaaagatttgctctgaagtacttcaaagcaactccccaaagccacagtgtgattagccttgttcatcacaatgaggtatttgatgaaagcatttatggaagtcaaatgtgtttctagaaaagaacttcaaatactacgccactcttcgtacagtgacgtaagaatataagtaggtagtcggagtgctttaaaagatgctttagcaatcattacaacttgctgttatttagttttactcaactagcagtctggaatccatgagtcactgacatttccagatctcaacccgtcaggacttaaaatgccatacaggaacacgtttactgacttaatgtcaatagggattagctttttatttccaagcactgtgtgggaacaggggcctgcattctcttctatctagaagacaagacagggggatgtcagctcaagagcagactgtgccgcttaatgagaccctgtcttaaagttgacaacgagggttggtactgtacctcagtgactgagttcttgcctagcttgcttgtgcctatcgatttgttcccccagcacttcaaatgcatctacccacacaaacgatccatatttgttaggattttaggaaattaaaattgagctccagagatatatcaccacatttaaacataagcatctgacacctttgcaggagagggaaaaaatttatcacttccctacactgagaactgagtttgtggatggagaaccccaggcttttaaatcaaatcacacaaaatccattaaaatcccagcacttgggacagaggcaaacagagctctagggagtaccagaccatctagggttgcagtaatactgtctcaaacaaaacagcataccccaaagatggggatataagttagtcgtagaacatttagaacatgggatcagctcatgacacacacacacacacacacacacacacacacacgtttggctgagtgcattggtacatgcccttagttccagcactcagaaggctgagtcaggtggatctctgtgataaagaaacaataagaggcatctgtagaaggcaatgtgtctcctagaagggaatgtaagggtggaggcaggtggatcacttgaagctcattagctagccagccactgaaacagatgaacttctgattcgattcaatgagagactctgcctcaagaaataaaagtggaagggctggagatggctcaaaacaccagctgctcttccaaaggaacagggttgtattctatatggtagctcacaactatctgtaaatccagttccagaggattcaatatcctctcctgatgtccacaggcaccaggcatccaagagggtcccagtcatatatgcaggcaaaacacacacacacacacacacacacacacacacacacacacacatttaaaaattaattaatataaaaaaagaaattaactggggaaagacatctgtcaacctctgtccaccacacactggcacaggtgcatgtgtgtaacacacgcacacaaacacaaagtcaggcacacacaagacatgagtcactttcattaattttcagaagtagattgcctatgctaagggttccttaacctttgggtttttttccccataacctctaactttggattaaaagattcactgctctgctgggtggtgtggcgcacacctttaatcccagcacttgggaggcagaggcaggcagatttctgagttcgaggccagcctggtctacaaagtgagttccaggacagccagagctataaagagaaaccctgtctcaaagaaaaagaaaaaaagaaaaaaaataaaaagaaaaagaaaagaaaagaaaagaaaagaaaagaaaagaaaagaaaagaaaaagattcattgctcatgggctggagagatggctcagcagttcagagcactgactgctcttccagaggttctgagttcaattctcagcaaccacatggtggctcacagccatctgtaatggggtccgatgctctcttctggtgtgtctgaagacagctatattgtattcatatacataaaataaatcttttttttaaaaaataggattcactgctcacatgactgcatttaaaaatagagtacgggctggggtggttcagcagttacgtgtccagagttcatttcctcatttcccagagcatagatggtggattacagcctctcagagctcaggctccaagggattcgaggccctcttccggccttcgtgaacaaatggagacccaagggtggctatgatttcctcctcaataggaggctttagccaggaagtggttgcacacaccttttcttttcctttctttctttctttctttctttctttctttctttctttctttctttcttttctttcttttttttttttttttaagcaggacctttggaagtgcagttagtgctcttaactgctgagccatctctccagcctggtgcacgccattaatcccagnnnnnnnnnnnnnnnnnnnngtgcacgccattaatcccagaactcgggaaggcagaggcaggtggatttctgagttcaaggccagcctggtctacagagtgatttccaggacagccagcgctacacagggaaaccctgtcttgaacctcccccctccaaaaagggcaggggggggggttaataaaaaagacagagaaaatcactgtaattcaaattcatagttctcttctcaaactaaaaagtttgcatgaatgttcctcctagccacaacagttgatgaagaataagttgctttaacgtttctacaacttcagaagagacttgaatctatgccttcagttacttccttgtcaataaggagtgagacaagaacatctttcttgttctgtaatagttggcaagaaaaatgtgtgaagtgtgggttataaaggaggtggttagctatctctaattacctgattatctttgctgattaggactgtgaagcttgttgtgtcctgccctgggggcaggaggcctggtttggctgctgccacaggcagcatcaacttggatctctgcagccacttttgcagagttcaagaaagactgtaggaacccggtgtgtttagaggaccaggactcagccagaattgctgatccaactcggtcaggaggagagcgccagaaataaatttcagaagccaaaatattatgccagaagatgcatcttgacgtggagagcagcgagcaaagcaaggagaagcaatcagaggcagggaaatgtctagaggacaaggtctccaccgaggtctgatataggaatcttgcccttgtctgcatggaggggtttttagctcatggtctgttgttgtaacacagtaccagagctggggtactttattttattttattttatttatcgagatagggtttctctgtgtagctctggctgtcttggaactcactctgtagatcaggctggccttgaactcagaaatctgcctgcctctgcctcccaagtgctgggattaaaggcgtgtaccaccactgccaggctgagctgagtactttaaaacaaacaaacaaacaaaaaacaaaaaaggtttgtttagctcacagtgttggaagttcactagcactgcgccaagcccagggtagtggcacatactttaaaccccagcacttgaggcatagcacctgtatggattggagaagtggtgaaggacctcatggtagacagcttaacaatggctgcagtgtaagagtggtaagtgtcacatgcagaagagatggggggaagtaccaacctctcctataataacttaacccttttaggggctaacctcctccaggagatctgcattaatccttatgagggtggtgccccccagacctcctgaattccactaatctcttaaaggtttcatcatgtcagtatccctgaggaacaccaagctgccaacatacaaattttggggtgatatggtcaaatcatatttaaaccacagtgggtggtatttttaaaaggcttattgggagccccacatgatatcaaatgcctttgataccagcactcagtaaggagaggcagataaagcttgaggtcaccctggtctatatagtgaattccaggatagagctacatagaatctgtctcaaaacaaaacaaaaaaccaaaccaaccaacaaaaagagaggagggggggggagagggagagagagattaattggttctataacttattttgggcagtggttacataccatgtgtgattttataactcgctgaacgaatatctattgtgttagatttctattcctgtaagaaaatacctgagataatcaacttaaaaagaacaaagggtattttggctttcagtgcttaagcttggttggcccattgctttggggccattggtaagacaatagatcatggcaagaataaagtgtagaataaaactgcttatgttatagccaagaataatgaaagaagagtcccacatctcacagttccctataatcatgcatccaattacagatcctttgacacatgggccttcagagtacactcaaaatcctgtgcaatctttgtattgatcatgtgctgattatacttttaaaaaaatttagaagcaggctggtttttgtaaatttaagggcagcttggtctacaaagcaagttctaggacagccagggctattctacagaaaaaaaaactgtctcaaaaagaaaaatgaaaaacaaaaacaaaaaccagttactttgagccagcatggtgctttcttcccagcacttggaaggcagagataagcagatctctgtgagtttgaggtcatcctggtctacacagcaagttccaggatccaggacaattagaactatgtagtgagaccctgtctcaaaaaaaaaaataattcttttggattttgagataacgtccctctctatatccagttaacctggaattcacaaagtggcccagggtggcctcagattcacagtgtttctcctacctcatctaaggactgggattaaaagtgtgtgtccttatgaccagcaggaacaagtttatttattaaaatttttttaatgtttttatatgccctgtttttcctgcacgcatgcatgtctgtgtgatatttcagatcctctggaacaggtacaggtagtagtgagctgccatataaaaattttaacctgggacatctggaagatcagtcagtatgcataacacagggccatctctctagcccccagggggccagtttgtttttaatagatacaggataccaccagcccctgacaatatttctatataaaagaaatacattctccaatttggaacctttacagcaagtagcgtgttggaattgtatatgtgtgtgtgtgttcatgtaggggcacctgttaggtgtctcccactgattaagctagactgttgccactccgcactagaaactcccctgtttttgtgtccccagtgctgggattatgcatacttatccagttttttacatgggcactaggactctagatcaggtcctcattgttacagggtcgacacactacccactgagccacctggaagccagccaagccagaactcttctgtttaaaaaaaaaaaaaaagattaattttatttctgtgcactggtgggtagttgcgtgtgaatgcaggtgtagccagatccccaagctggagttacaggcagttgtgaccagcctgacctgggtactagaaaccaaaccgaggtattccacggtagcagcattcaccgttaattgctcagccatctctccagccccagcctgaaattcttgattctcagcttctgagagatgtcagtcatattccagagtgaggggcttctccttctcaggcccccatgctttcaaaggctacaattctatgatcagtgaccaaacaatgaacaataatgtactcaatgcacgcaaactcaggttctttcccaaagagccaaattctcagaactcagaggtcagcttgctgaggagagaaatcagacaattcaaaggaaatgtcacacatatacacaatgaaaatcagctaatgtattttccgccactatctaaacatgacaggaaaacaaaacatagagtttgaggttacatttacttatttctttagtatgtgtggaggggatgtgtgtcaaagacagcttgtaggaactggttctcgtccagtgagtagattcctggggattaaactcagattgtcatagctgctggctagtgcctttctccctgtgccacctgactggcctttttgatttttgttgttgtttgtttgttttgaggctggatctggttgttgccttggctagcttccaactccttcggtagcagagggtgaccatgaagtcctgttcccctagcctccactttcaagtacagatattacaggcagtgtggccacacccaagtgaatatgtttagcacatggacttctagttcccaagacatgtctgaatacttaggagtaataaaaagccttgctttaaaaatattacctcagcaggatgataactatgcatctgcaaaataggaaaatgtgtacacggcataactacgtacacctaagatttttccctttatttaaaccatgtgcattttgttagactttctagtggccagaatctagccaaagcattctatttgaaggtgagagaaaaatcaactgacgtaagtacttggctgttagacattcaacaaagccagtctcaaaaagtaacgaatgtgggccaggaatgtggcttgctggggtagatcatttgtccagcacaagcaagggttgagtcccaaaagctcaaaaaaaaaaaaaaaaaaaaaaggaacatactagacacacacacannnnnnnnnnnnnnnnnnnnnnnnnnnnnnnnnnnnnnnagaagagagagagagagagagaatccagtaaggtgcctgcagtggctcacaccaggaatcccagcactggagaggcagatgccattttcagcccagtctgggctgtgtagtggaacactttcttccatgtaatcctatggattatagtggtggttaaaaaaaaaaaaaaaaaaaaaaaaaaacaaaaaaaaaaacttttcataaaatttctgattgtgacatttggtggcccttctactgtgagtccttggaaccgtgtgaaggactttctcttcctgggcaaaagtttttgctaacactacagacattttaaatgtaaggccttcgttgatgtcctatggaaacccgaaaggtgaacaagcaggttcttaagggcccctggctaaggaaagccagtcccatatcttatcttttccgaagcagcaggcttaaggtagggcttcaaaacaaaagaagccttccctaggggaaggaacttcgtgaaatctgcatttctgagaggttctttgggggaggggaggagggactgaaatttatccctctgactcttgacttccctttcagactaaatcgctgttgactacagtcctgccgatggggactttgggactaccgactgcttccagtctcctcgcccaagtagatgctaccgtgaagctgggctcttcaaaatggcagctatggtcaagttccagaaagatctgatatctttttaacccagtagcaaaatatggggcggtaccactgcagacccaaaggagaaaaggccgtttgctcagctggccacatgctccaacacttcgtgctaagtcggaccgtggccacctcggctacccacagcgagagctagcgcgctcctgggttccgaggtgaggtgtcggaaggttcaaaccaccgcggtaaatcgcatctccaggtggtttcaccgacgctaagaagcccttatcgctccgatccgatcggataggtgggaaaacggcgctggtctgaacttctaagttctgaggtccactctgccttgcgtccacagagctgcggaccgtttcagcagcctacacactctcctagcaggcggccatgacaaggctcccttggcgcgaattacaggggagacccaagaaacacttaaaaaagaaaaaaattccatctcaaagatccgaagtggagttattagggtagggttgtgcaggaactcggagactcactcgaggaactggggactgaggcgtcaacacctggacacaagagacaaaagttagaggggtcccaccaagggggtcgccagcacgctttctgcccgattggcggaagcgctcagacttttctttatggcgtcaccgagtacctgcctgtaggaaggctccagttgcgtgacgtcacgccgcactgaccaatgagcggcccgagccggtaggccccgaggagggttgtgggcccttctttttgtgaatgaagctccacggaacatccctcctgggggtccccgggagccgcggcccgctgagctcggacgccacggcagcagcgtcccagggagcgcgcgctttgctccagccaccggccagcgctgtggggcccccgggtcgcgggcggcgggagacgcagcgcgaggacccgggccgggttgccgggccatggtcgcggtcccctgacgggccgcgaccgcctccatgaagcgtaagagcgagcggcgctcggcttgggccaccgcgcccccctgctcacgccgcagctcgtcctcctctcccggcgtgaagaagagccgcagctccacgccgcaggagctgcaccgcctggagcagcaggacgacctgtacctggacatcacgggtgagccccgccacacccccacgaggctcgcgcctcctcgagcctctagtcgcccgtgcgcccgcggtagcaactttaccggagatgggccgaggggtcactcctgcaagtgagtccggcctcgggagcggggcggctctgccctcgaacccacctcatcgcgggatgagccggcgcggttgttcccacgcgagtccgagcctctgctgagtcccgctggtctttgctgtcccgagggcccaaagcctcgctgagccttagcaacgcgtgggatccggcccgagcccccggccgtccgacaccccccccccgccccccacgctgtcgcgccctctcaggcctcctgagggatctttgccctccctctcgtgcctccagaaaggtgtcacgttgatggcgtttgaaccaccaagcgtgctaagagctcagaggtgtcacttttgagaaatccccgccagccggagcgggtagaatagccgctttcgagggtgattttttttcttggtgtctcagttcttgaagacgaaagaaatccgttttggcagccgctcggtttgctggggttgatagagaagccagagctttgccttcgttgtactgatgtacgtggaaaagcgttgtcagctgcatagttgcctgcgcggttgaaggaaggtgccgcgttttctggggcggatggtgtccacctcttcgtggggttttaagaaaaggtttccaagacttgaacttggactttgctaggtgggctctcgattggtgacatttatttatttaggaagtgtttagacaaacaaatttagtagaaagtatattctagattaatgggcaactagaaagtaagaccggtttttaaaggaagctgagagaagaggaaggggtttttttttttttttttttagcgtttgaaggaggaagacgaaggacttgttttaactatagcccctgactagtgtctgcccaggtctaccggtgtgtgaccctgaaggaggagacacccttgcctgggttccttccagagacttcgtgctggttgaatctgcacattatttctgctcttttttttttttgtatggggcaaacttattttcgtatagctctaaattgtaaagatacacagagtataatgagaaaactttgtggcaaagacaaaggagtgccccctaaatgtaacagatgttgccaagttctcgtgaatctttccagaaatatcctccactggcacacatatgtatctattctttgcaaacccatgcaggatggtatacgattgatttttgcattgctctgcacggtacttcatagcagaatgctagcctccaattgatgtgttcaaaatnnnnnnnnnnnnnnnnnnnncccgggccgtccgacaccccccccaccccccgccgtcgcgccctctcaggcctcctgagggatctttgccctccctctcgtgcctccagaaaggtgtcacgttgatggcgtttgaaccaccaagcgtgctaagagctcagaggtgtcacttttgagaaagtgggtagaatagccgctttcgagggtgattttttttcttggtgtctcagttcttgaagacgaaagaaatccgttttggcagccgctcggtttgctggggttgatagagaagccagagctttgccttcgttgtactgcgttgtcagctgcatagttgcctgtgcggttgaaggaaggtgccgcgttttctggggcggatggtgtccacctcttcgtggggttttaagaaaaggtttccaagacttgaacttggactttgctaggtgggctctcgattggtgacatttatttatttaggaagtgtttagacaaacaaatttagtagaaagtatattctagattaatgggcaactagaaagtaagaccggtttttaaaggaagctgagagaagaggaaggggttttttttttttagcgtttgaaggaggaagacgaaggacttgttttaactatagcccctgactagtgtctgcccaggtctaccggtgtgtgaccctgaaggaggagacacccttgcctgggttccttccagagacttcgtgctggttgaatctgcacattatttctgctctttttttttttgtatggggcaaacttattttcgtatagctctaaattgtaaagatacacagagtataatgagaaaactttgtggcaaagacaaaggagtgccccctaaatgtaacagatgttgccaagttctcgtgaatctttccagaaatatcctccactggcacacatatgtatctattctttgcaaacccatgcaggatggtatacgattgatttttgcattgctctgcacggtacttcatagcagaatgctagcctccaattgatgtgttcaaaatctcatttgattttaaatgctttgtaagccaaagggtgtgtggctttaaagggttaaactataaaaaatgtttatggatttaaacgcgtttatagttttaaatgttttatgaacattttaggcagttctctgttgaatatttaggtgattttcaacaagaaaaattgtaaggctgggtgtggtagcccatgcctttaattctagtactttggaggatctttgtgaattcaaggtcagccttgtgtacttaatgagttctaggatctatgtagagagtatcttgtctcaaaacaaaaagaaaaaaattgtaagatttaggcagttctcagtcagaaaaactgttagtggatctgaagcgaacattcagggcctttgtgcatgctagaccagctcttcagctctgagctaggacccaccaaaagaatattgaccccaggcgttgggggaaatctttctctttcgtggggataaagtgtaacttggcaagccttcctgaggaagtcatcaaagaaataatgttttaaaaggtcagtaatactgaaggcgcttgtgcattttatgcacaaaatcaaaatactctccagttacaagccttgataatggagcaatccagacttagagcaagatgctgcactagctccaggggacaaggcttgcaacccttcagtgagtaaattcagtttcaagaaagaaagaaagaaagaaagaaagagagagagagagagagagagagagagaagaaagaaaaagaaaaagagagagaaccaacaaccaaacaagaaaaacccaagacactaaaacagtctgtttctgtgttatttgctaaaaaaattgaagtaattgttttttttttctaaatgacttacttgtatgtgtatgtatgtgtgcctgagtgcatatatgtttaccacatggatgcagagcctccgggagctagacttggatcctctgcaagagtagacatctctcagcaccatgcacctctacacctctaaaaacactgggtctcattttgtagtctagcccagcttggaactcactaaaccacaccagccttaaacttgagatcctgctgtttcagcctcctcagtgcaggggttacaggcatcagctagctaccaggtaaagtcgccgcgctcagattacttttatttcttattttgtgtgaggtagtaatggaggcagggaggtataaggaaggctctgcgcttagcaaaaggcagcttggtcccttcatttacaacttttttcccatcactcgttgttttattgttatttgctttttgagacagggtcttactatgtatatgtagcaggctgatctgggactctgggtagacaagggtggccttgaactcacagagatctactaccttgaactcacagagagagacagggatatttaactcttaccatgactgtatgcgcaaatcagaggacagcccttggaaactagttcacttcttcatgttagttttcagaattgcacgaaggtcatcaggcctggctgtaggctctcttagcagctgagccacccggatgttctccgtttcattgcccagtgctgtcctgttgcatggctgagtcctgatctccttagcagtagtaagttgggatttgggaatatgttaggttctatggcaaatggctgcagaagcaacggtgcgtggagtcttcgtacttcttcatacatgtgtgactctgtaagtgaattttagaagtgaaaatgttgggccagcattacacagtggacttttggacttgtgtgcatattgccactgtgcacattcattcatgtgcaggcctttgcagggacaggctttcatctcctttggatgcgtagcttgttgccatgtgtgataactccatattctcacatctcgctcgggtgctttcactgtcagctttcctatctttgaggtgccagtcatttctacgtcatctttactaacacttgttcctgagcaggaagacttttgtagtaagacatggtttggaaatattaaggcatgctgtctattttgcctgctcttcccctaaggctttcctaaaacttactgtgtagctttgaatggctaagccctttgcttccacctgagtgctgcggttatgaacacgaatcattgtgcctggtgtcatgtgatgctggggactaaaccaagctttgcatgcatcccaggcaagccctagtccccacactcttttaccccaaagacccttttttaaaaaaatatttttcaacaggatttctctgtgtagccctgggtatcctggaactagaccaggctggcctccagctcacagagatgcgtctgtctctgcctcctgagtgctgggattaaaggcttgtgccaccaacaaacacccaacaacccttaatttgtttctttgtttgtttttgtttttttttggtttgtttgctttttgttttttgtttgtgtttttgttttctgagacagggtttctctgtgtagccctggctgtcctggaactcagaaatccgcccgggattaaaggcgtgcaccaccatagcctggcaacccttgatatttttatagcagcctgttaaaaatgtaaatgaatttctgccaacaccagggtcttttgactgtgcgctgcttgctcattgtagatgtttgcgtgatcactcttgttcttgactaactataattatgactagcctcatttctgtggggtttactcctatcagaagcagacctactcaataggggtagaattcccaccccaatccactcagcgtgctttgttgttactgtttttgttttgttttaaaattgaactgtatttctgatgtaccatgaaaaccaaatctaaagacggtgaactgtgcaccaaatgccctgagatactaaaaatgccagaggaagcttcaattagttaaggaaccagggagaaaagaggacttgagtttttagtgtgttgaaaactgtaagactcggaattgggggaaatcagtgagaaaaatcaaaggacaaaggattctcctcttctcttctcttctcttctcttctcttctcttctcttctcttctcttctcttctcttctcttcctcttctcttctcttctcttctctctctctctctctctctctctctctctctctctctctctctttctttctttctttctgagacagggtttctctgtgaagccctggctgtcctggaactcactctgtagaccaggctggcctcgaagtcataaatccgcctgcctctgcctcccaagtgctgagattaaaggagtgtgccaccaccgcctggctggctgactgaggacatttttaagcaattgaacacagctacaaatctgatcgtctcatagttgatacagaacgttgatttatttcactgttttatcttttaagtttctaattattgaagaaaaatagtaaatagttactattggctgactaaagactttgtttttattttatttatgcttgtttttagaggcagagtctttactcatgtaggtcagtataccttgaaattgataggtatgactttgaacttgtgatcctcatgccttcacctccgtagtgctgtgattacaggcctggtttacacagtgctggggattaagccaagagccttccactaggcaagggctttactgacagagctacatccgaagcccctgttttaagtttctttattctccctccttttaagtttcctatgatctgccatggtttagtgtatatcataataacttacgggataatctctagttggggtcatgctagtcatttccaagcactgggtgtcttatgggcagcacaggctcctcagacaaatgagagcaaccaaagcagcactcccctctcccctctccctttaggatctttaaaattcacagcagatgccattggctagggacgtttattcattaattcaagaagtgtttattgaatgcttactatgtaaaattcttttgcgaattcattgtttgccctgtgggagtgtatttttctggatagaagaggaaatactgtgtgacacagaacacagaggacaaagtaaatccatttccattgctcctgttgtagcggaggagaatctcctcgacgtgtccgtttgtctttgcacctgcaatgtgcctgtgcactcttacctttgctgcatcctgaacccgtcttgatttctctgcttcctagctctaatgcatcttctagctctggcagttccaccgcacataggcaaagaagttaagcctcaaatgctatttcttttatggctttatagtggcaaataggtgaggagggagtggtgcaggaccagccctaaagtcagggaatcaccagccagcggtcatcggctatgttctgtgtttataaatgatattggagagagctcagccaaaaccacactgagaattcttaggatgtaggtagacggcatggtgcatgctgataacagttctggaaaaattctgattgtgagttttaggaaaggtgctttgtgggtgtgcaatttttaacattttaaattatgttaattctctctctctctctctctctctctctctctctctctctctctgtgtgtgtgtttgtttgtttgtttgggagtgggtggatgtatggcagtcagaggacaacttgcaggaactattttttcccttccactgtgtgagtcctagggtttgaattcaggcggttaggcttgggcagcaagcacctttactgatctacccatcttcccagccatgtgtgtgttttaaataattcaagtggttatctaaagataatatgacccttcactttcccacgaggatgccatcaaatgctggagattagagatttgggcaaatggatggtctctgtttaataaagctgtgactgcccaacttttcctttttccaacagatacaactgcttcatagttgtataaaaattactcggcacgttggacatttgccagctcatcccgcgccacttaggcaagcaggcatgtggtgacggtctcttggtgaacagtacctgcaaattgaatttagaactgagaaactagtggatttggacaaatacacaacacaaatatagtatgcaggtcgtcctccacgcgtgctgtttcccaaattgaccactagcacgggcccaactttcggacacgtcatttattcaacaatgcccattgaatactatcctcaggtgctagaaataaagacccggtaccaggacatctctgttctcctgtgtttttgtgttgagaaaacagaacttggaaggtgagggtgagagacaggggatggcaatcaagtgctgtgcttgaaatctgcggggcaggttttgaagagcgaggtctcaggccaagcttttgggaggctgaaggactcaggaggaaccttacttatggtctctgccagtcacttggactgattgttcacaaccttctggagccccgattttccagtgtgtcaaagatgaaataaagggacatgcatggcctggtctccaaatgcctggattgaggctccagggttacccaggtaacaatggtggggtggcaccgggtgacagcagtgaggtggaggtcattctgctcctcccagctgagaagtgcacagtcccctctccgtgcatcagcactgaggcagtgagtgccgttgagctgacagctctcagctgctacactgctggcacaggatgcatcagagtcagcgatgaggccagccttcagagacaccgagtatcctttaaagacttcaaagagcaccagtacaccaaagctccaatttcacatctgagctgttatcctggagtgcttataggttgttagtttactcgtgtctcaatgccgaggcttcacttgggagccacagaggtgaagtgggggccttacaacgacagacatggacaacagaggcccttccattactttatccgtagcagagacatgttatgtgcaaaggtcaaagctggaaatagattttttaaaattgttatgaactagacttttccctttacatttatctgtgtgtgagtgcacatgccctgggtatgtgtgagcctgttctttctctcctacgtgggagactctagtataccagttctgaggtttaactgcttagccatcttcccagccccacattaatgtctttatttttatatttattcgtttgaggtagggtattcctatgtagccctgattggcctggagcttatcactaagtggaccaggctgttttcagcagacacacagaattccacttgcctctgcctcccaagtgctggaattaaagatgtacttagttgctataatttccaatcccgataaacccatataaaaacacacacacaatccaattataaatataaactatatgcttagattgggcagatctagacactatactcacttattccccagctataagaccctttgctacttactgtttctcctggccatgtggttcaggtccatggaggcttcctcctcttctgtcctctctcctcctctcttgcctcttctctcttcttctgcccccactctcaagcctcctgagaggaaggttcacatgagatcaactgagtattcgaaggactgctcttctgggggaacccctcttgaggaagcagaattaacatcagaatacaaacaacagcaggacaacccacaaccggtcttttattattttggctaagatttaaaaattaatgtttggggaagttcacttccgtaaacagtattttaccatagctacagaatatttttgcctaagtcagtcctctaagatgctttgttggattttttttgggggggggggagcaaagaactggacatactgtttatgtgaacatctcaaagccgtttgtcacctggaaggcacctttaccagttgcataagcaggatcagaaggtgaagaaactgtactagacatagagaattggagtctgtagaagctaaccagtcttctaacatggcttcttttaatctcatgtttaaagcttccaaacttggtcatttagcttctggttggtgttttgtttgtttgttttgggttttattattttttttttgttattttttttttggttttgttttgttttgttttttggttttagacaaggtttttctgtgtagtcccggctgtcctagaactcactctgtagaccagacactggcctcaaacttagagatatacctgcctctgccttccaagtgctgggattaaaggcatgcaccaccactgcctggctgtttgtttttaaattagtttttttgtttggtttgttttaaattactttttatgtgcatgagtgttttgcctgcatgtgtgtctggtgcctgctgaggccagaagtaagtgtcagatcccctggaccacgagttacagaatgttgtggggtgctgggaatggaacccaagtcctctaccagtgcactaagtgctctcaagcccccatggtgtctattggtatttgtttgtttttaggtgacctggcttcagtattatgcagagattattgtagaaaaacgcttccaaaaacagagtcgattataaaaacaaggcaggagagatggcttagcagttaagactatatactgtccttatattttctatctaaaatttatttatttatttatttatttatttattatatgtgagtgcactgtagctgtcttcagacacaccagaagagggcgtcagatctcattatggatggttgtgagccaccttgtagttgccaggatttgaactcaggaccttcagaagagcagtcagtgctctcaactgctggctgagccatctttccatccccagctttcagcttcttataacttcagctctaggtgaattcagtgtcctcttggcttcgtttagaacctgtacacatttgatatgcacacatagacacacaattaaaaagtagaaataaatcttaaaagctggttttaaccttcccaaagtagaatatatatattctaaagattttaaacttacatttatttagtgtgtatgtttgtgtgtgagaaagaaagagagactctgtgtgtgtctgtgtgaacaagcatagatgctggcgaattggttttcttatttcacaatgtgtgtcccagctatcgaactcagttttttgggcttggtggcaagtttctacaagttatgccatcttgctggcccttaaagtcaaggctcttgacgtgtgatacgtacaactcatttgggccctgttttgtagaggttttatgccccgcccccttttaaagcaacttttcatgaatattgctccatcaaaggtagtcaggtccttgactcctttatggttctttctgatacttgtaaatagtaaaatctaatctgtgagttgtgagtctcggttgtgtctatttctgcttgtccttggtttggtttgaggtgacagcagctctgactatagatcaccttcttcacaactgaagctgaaactgcccttcctgtgaaaagaggagttgatctctgtatatgcgtaataccaaatgtgatttccgggtatttttttgttatgaatgttaaatgatgaatgcttttggtagtaccaaatttgtcttttaaaattgaagtaccttttaaaatggtgctttctgaaataatatttacaattaactgatgtaagagttattctttttggtttgtttgttttgagagagggtctttaaaataatagtttctttctgtttgggcatttctgtgcctacctggcaggtttatgtaattttttaattctgtgaagcacaagggaaatttcatgaaatgctagtttcaattgggtctctgggaagggcttttatgttctgttttggattcagacaggaaatcaagctgggtgctagggatgggacccaggagggcctcttgtatgactgtcaagctctctcgcaaaactacagtcttagtcactttttttttaagtattctaatttattttgattttcaagttaaataagggaaccagtggtcccaaccatataacatgtttcaataattattctctctctctctctgtgtgtgtgtatgttttgcctgtatggaagtgcactctatgtattcgataacctgagaaaggccatcagatcctctcagtggagttacagatggttgtgagccaccacgtgggtgctgggaatggatcgtgggtctcggcgagggcagcagatgatcttgggcactgagcccctgctctaggactgtccagttcttcctagttctcagcatcagttatacgccagaggagcaggtcccttagagggtgcattgttcaccagtcagaagatttagtccctctgtctggaaagcagaggaaagctgtgctggaattaattctagaccagcatcacacatgactccatgacttcccaggtagttcatttttatcccattaaaattctgttggcagcctgcttttcacaaaagcaaaacatcttgttcctgatgtcactggaatttgttgttccttcaggttctcatttgaaagtgaaattactctcagctctgctgtgcagtttacgacattgatctctttatacccaatccataacgctttagcatcgtttacgaatttcgaattctgcaaagctctctattttaggaccatctctgctgaatcattctctgagttttgctcttctgtatgaattattctatggaattaattaaagtatctattcagtaaggaattatcacacaattgctatgagcaagaaattgtaccaagaatttattcctgagggagggggcagaggactggaagatttataatattgtgtccctatctctaaacagggagaacagtagatttttagtcatctcagagaagacagctaacaaggacttaaccatgtggctgttctctttaaaatatcagtttgagatagttttatgtttgaagtgtcacttgacagttcctgcatgatttcagttactttccccagtaagttgtcggaaaggatccattttaatggtgtatctttgtgtgtctatctgtgtgatgttttatgtttgttttgttttgttttgttttttaattctatgctttacctttgttctgtttggacacaaactagagtcatctggaaatagggaatcttaattgaggaatgtcttttatcagattggcctgtgggcatgactgtgggacttctgggatgtagaagtagatgtagatgtagatgtagatgtagatgtagatgtagatgtagaagtttcccttatcacagaacatggagcagaaaattagtcatcctagggaagacaggtaacagggactcaactgagtggcttcagatcccaccgccaggttcctgcttgagttcccttggtgatagactatcacctggaaatgtaagatgaaataagcccccctctaccccaagttgcttgtggtagaagccactgaatatttagttgctaaatatttcagtagctacattaggtgtgtgagctgaactgaaaagcacactaactttcacattcttttagggtgctgagggagaaatgctttgacaaggatgtctgatgtaatttaaaattatgttcttaactctatgaaagatgttctcaaactgcatttggaattaattgttgaaataataagtagcttgttggaagtgcctcacacatgagactgaaacatcctaacgtgcgtttcttccccttttggtattgaaatatcagcaaagcttagtttatgaaggcaatgtgttcttgttttaaatcattgactccgaaagggcctaaagcacaaattcagtcaagacacatttggatacattttcaagttgcatccttgccttggctgcagggagaactgcaacagggatctcaggaagggagctgggaaaggtgtggctggtgcagcctttgctgcctgcaaagggaggacacttagcagtggatgccttgggatgatggaatacctaaagtttgaactgagatttttagagtttccttcctttccttcctcccttcctttcttccttcctaattaaaaagtgttttttttttttttttttttgagtccaggtctcactcattatgtgttcctggctggcttggaacctgctttgtagatgaggctagtcacagatctgcctgcctcttattcctaaatgctgggattaaaggtgtttgccaccacacccagttacattacttttatttagtttgagcacctgcacacatgccagggacagttatatcctgccctgagggtcttgggggatcaaactcaggctgtcagccttggcagcagaatacggacttttcttattttctctgtagagcaggaactgactttatttgtttatttgagcacttcatttaatttttgaggcaggtttcaagtggccaggctagctacgattttactagatagatagtcacgggtgttcttgaacttctgatccttctgcctctagctggtgctgggatttcagatgtatctccccaggcatttttccttaattaaaacattttcatagtttccaaaatgaagatgtccaggggttgcaggcatgtttattaatttcctttttttttttttctttttttggatttccaagacagggtttctctgtatagccctggctgtcctggaactcactttgtagaccaggctggcctcgaactcagaaatccacctgcctctgcctcccgagtgctgggattaaaggcctggctcttaaaactttttaattgaagctttaagaactcctacttagcatgatatacgagggcccaagcccttgagcagaaatgactggaagatgctatatcaccaatggggtgctgcccaccccattgtgagtgaacttacgaatatggcaacctggaacacataagcacagcctgccagcagctgaaataggttggagaatgtcctttccaggtgcctcaagttggccaaatctctctctctctctttttttttggtttttttttttttttttttggttttcgagacagggtttttcagtgtagccctggctgtcctggaacttacgttgtagaccaggctggcctcgaactcagagatccgcctgcctctgcctccgaagtgctgggattaaaggcgtgcaccaccacgcccggctggccaaatctctttcaggcacctcagctagtttcttctgccagaccgcttatctggtttcagtcttagcagctttgtatgagaatctttgcagcttggcttcattttgtctgagagggactcttcagcctttctttattcttgaaaagaggggcctagtgaatatgatcagtttcagggacttcctaggttatttgtttgttgttatcattgttttgagacaaagtttctctggaactagctctatatagacaagtctggctttgaattcagagatctgcctgcctctgctttcagactgctggtattaacggcaagatgcgaccttttaccttcctgtttttaaaagcttccctgcaggacctgatttttcagtatgggaggaaactgttacacaacagtgcattcaggggaaggagggaaaaggggaaaaaaaaaaaaaccaatctgcagattctagtcatctggggctgaagaatcagctgtcattaacaagaaaccagagcctctgaagtgaaacatttggcttttggaacaatcaatgctggtgagccaggctgaagaatcagctgtgattaatgaaagcatcaggtctgaggctcatgaagtcttctgcgaggtaaggtgcgtaaagagtcaaggtcaagacctgtaggcaataaggacttgtgtggctttagggttctattggcggttgtgtgaggagcatccagaaggccgacgggcagacagatcctgactgtggtgaatgtgttaagactggaagaatcaaagcattgccaaggtgcaatgccaggaatggatctccatggagactcagcggattcagagtcaagttccatttccaggaactcattgttctcaactaaatggagcgtgtctgagggtctgaagccaactctaagtctgttttctaacaagctaggtaacaactgttaggaattcttgagactactgtaagattgacaccgccccctcccctgtccccacccccatgtttaaccactcaggactttgatgggctgtgtgcgatagccttgtatgaagtcatttagctagcaaggagggaagtcatgggttacaggatgtgattacccaaagtcttcaaccagtaccttttggttgcagtctcttactgaccaaagccttgcactgtataccttgtttcttcagaattcttcttttggtttttcgagacagggtttctctgtgtagtcctggctgtcctggaactcactctgtagatcaggctggccttgaactcagaaatctgcctgcctctgcctcccaagtgctgggattaaaggtgtgcaccaccactgcccagcttactcttttttagcacagggaaaagaaacttgttaccactcaccctgtcagatgtgtaattgaacaaagctgaatctttcttctgggacccagagttagagatcgttcctttccttagcctactgaatattggttggcaacattggaatttagtggactaattagttcctctcatcttacccagccctttaagcccgttcctcaactaagggtgtagttactattctgggttcttaacaaactgtgtgtcagcgttctggtcacacttgatggtactgccttgagaaccattgaaaaagataaaatcatccctagtcatttagaaatatttgcctttttcagggacaagtttgggagcaacagtggggacaaaggtggcaagttacggagcctcaacaacttggtatctgaacaaagagggccgtggagagctcagtggtagagcacttgcttagcatgcacaaggctctaggttcaattcccagtaccatatacataaaattttcatgtttactcttaaaaattaattacacttatttgttgttggtctctgtattatggcataccataaaccccgaggcctgatattatttgatgtcactcggacattgctgggtatcacaactcaggtgtcgaggtgtttcagatgggctacccccatattgtcataacaacttgagaaatatatagagaacgtttgtttgcttgagacagggtttctttgtgtagcccaggctgacctggaactctgatctacctgcctctgcctcccaagtgctgggattaaaggcgtgcgccaacactgcccacaccaagagctttttgccctccaaaaaaaaaaaagaaaaaaaaaatcaaagcatgcacagcttgtcctgagagaccttggcttcccacttcccgtggagctgatgccaggcctgtgcagcacagagagcatagaggctgtggcacggagctaaatgacactacagggaaatcagatgtaattaagtgacctgtaagtaaaggtgtggatgcctggcagagcagtgtggcttggccatctagattgatgaatacagggctattggtgggcaccccacctgctcccttctgttttcactctgctgggcagcattcctcaagatgcagagcttcgggggaaagctcacttttatggatttcgttgctcctaacccaccttgtcctcttaaacaaataaaatcttgcacaccatctcatccaaaatctgcagtttggtgtggaattcagttccctgagctacttaattacttcccaccaggcattcacagaagtcatgctgagatgcaataatgagaaatgagctgagggcagtcgcagccagtaatgcttgcccagcacgcacaaagccttgcattctatccttagccctgccaaggtgatgcatgcctttactcagtgctgggaaggtagagactggaacagagaggcttttcctcagtcctagatgtgtctgcacatgccccacccctgagtcagttctaacgtcgtagactggttctgtggggtcagagcttggaattacccagatgccacagccaaatgacattgtctcccttgatgctctctgctgtcactttatttgttaggttcagggtctggggcagcccagagaaatcagccttggccacctgttcctagtaggccagtcaaatgaggcatagtaaaagcatacatgaatttatttaatgtggccactttgagaagaggaatgaataaagagatccaatgcccatcccaagttctagggttcttatggggaatttaggtttaaataggcgtcggagcttgccatagctgtgcacacctttagttccagcacctgggagacagaagcaggtggatctatgtgagttccaggccagtctggtctatgtatcaacttctactaagtcagccagggctacatagtaagacaaggtatctaactaggcaagactggctgaggtatggccctacccatcattggctaggctccagagtttcccaacaggcagtttggttatcagaaggttgctcctggctgttaccagacttccgtgtttccctttttctcaacttggaatttctgaggaaatcccaatctcttggagtatatagtctgatggccaaagggaggggcacaaggtctctagactatttccattcctgccaagattgtgacactccctgtggtgaggtggggatgactgctggacgccgagagtctagtgcttaggtaggatggaccctgttagcgtttccttttgttctgcttagcttgcctttccttcaggtcatttaaccggtgacggatgagtgcctggtgtgtgtctggcccccatcggttcacgtgtcaggatgcttggctcatagggagttgcattattaggaggtgtggccttgttgaaggaagtgggtcactgtgggggagggctttgaggtctcatatataagctcaagctatgtccacgcccagtgtggaatcagagtctcctcctggctgcctgaaaattagtttacttctgctgcttttggatcaaggtgtagaacttgctcctccagcaccgtgtctgccagcacacggccatgcttcctgccatgcttggtagtggtggactgaacctctgaaactaagacagccccaattaaatggttttcttgtggttttgtttgattttattttatgagttgccttgttcatggtgtctcttcacagcaatggaaatcctaagacatagagtatgtctaagtctaagaggcttagtgctgggaagtcgagacccaggccactcaggcatccacagtggagggaaccctatctcctagtatttgctttgctgaccagggaggctgtgggtctctcactgctcagcagttatgttagaactgagagaccgattgcctataagcctgctgccatgcctgagagctgccaagaagcagagtaagcacaggcaccctctccgcagagggccgtgctagaccgtttcagaagtggagctctgaggagcaaagctagtatagatggagccatgtggtatgtcatcagcagagccactctgtctccttattcttaatctactttaccttttaaatagtaaatagatacataaataaatgtggttagcatgtcaggaaggaacagatagtcctcctaagaaaacataatttagaagcaatcggcatgtagcatgagccagtcctggctaagtccctccctacccaccactgcccagagaacagttggcttctgtactctttcctttgtgagacctcagcaccgcagttcctactttttaaattttactactactactactattatttttttgagcaacagttttgactgaaaataggtaaaaatattatttttgttactttattttgagacaggtctctattttgtagctctggctgtcctggaaccagaatggcctcaaactcaagagagatccacccgcctctgcctcccaagtgctgggattaagggtatacaccactaccacatctggcagataaaaatgctatttaaattcccctgttttctggtgaatctttgttatcagggtctctgtagcccaggctagctttggacttcagctgaggataaccctaaccttctgatcatcctaccgctgctgtccacagtgctgggattgcaggtttatatcccacaccagtgttaggcagttctggggagccagccagtctctgaattcctgcgtcccaagctcattattatcttcttcctcctcttcttcctcctcctcctccttcttcttccttatcttctttttttcttcttctttgagacggggtttctctgtgtagccctggctgtcctggaactcactctgtagaccaggctggtctcagactcagaaatctgcctgcctctgcctcccaagtactaggattaaaggcgtgtgccaccatgccaggcgtggagttggttttgatatctgctgggcccaagctcattttcttttctaattttaggttgcaatataattatttatgatcttaaggtaattatattaagattaccattcattgtgtttcaagtccaaagaagtcaagattcttttatttttttcaatttaatttttaagttcatgtgtgtgtgtgtttggcattcccatattcatgtgggtatccttggaggccaggaaaggacattagatcccctggacctgggattacaagtggtcatgtcccacctgaggtgggtgctgggaacaaactcagttcctctgcaagagcagtacagctcttaactgccgcactcactgtctctccagcacccgagatgctttcttcagctacctattcagctctggctccttgaagttataaagtacagcttacatacaatcaaatgtttagttagagtttatcaagtgtatgaaccactgctctgaaccttctttccgtggggtttcttgtctcatacccactccatgaacaagtcaatttgtgtctgggccagttttgcctgcacttgaacttttgtgtacacaatcctgaagtgtgagcttctctgcttgaggtcagagatgcaggtgttggtctgagcatcatgcacttgctctctttggttggtgtttcaatggggagtctgctcattgactgatggtctctagttgttactggttgtttctaggtgttgtctataacaaagctgctgtgcatatatgtgcaccagtccttttgtagacacttttcttgggtatatggagaggtcaaagggaaagttaacttggaagaaattgccaaccatttttattggggttttgtgtatttctgtgcctgcagtgggtgaagagaccagggtcaatgttgggtgtcttcttcttgactcacgggcagtttccacccccccaccccccactagcatatggggctctaatgcatggaggcttcttttctgtgttttgtgtctccctttttgttaggagtcggaaggggtgaggttaggttcgagagtgttttagtttgcctctctgttgctatgataacaccacaactaaaagaaacttggggagcaaagggtttatttcgcttacaggtcacatctaggatgacctagggcaagagctgaaataggaactgaaacaggggggggggatacagataagggatggcaccacccgcagtgggctgactcttccacattcattagcaatttttaaaaaatgtctcaaatatcaagggccagtctgattgggacagttcttcagttgaggtttctctacccaagtgactcagaaaggcacagaattgaactgtccttctggcaaaagggacttgggaggactgaagtaaaactaagccagtccaggaaaaacaaaggatgttcttttaaggtcttctaaggtttgcctgtgtgtgtgggggggtggggtgggggggggtgtgtgtgctgtgccctgaggagtaagtgaatccaaggtcagttgccattatcaagttaagaaacactgtgttctttgcaatttagggtagggcaggtgtttggaaggtcccaaggacactgttggataaggaaggggcttcttaaaattccacagaataatgagcctcattagtgtatgacttatgggacatggccatagtcagtcagctttaggtctgcatgtgttctttccctgcctgcagtttttctttgaggcctttattacttaaagtcttgtttgcaggagggtcaggcttccactttgccacttttctgtgttagtggacgttaatattattttatggttcttaggagtataggcatatgctcatggctctatttctttcccaacaagcagacgtagtctttctaatcttagccattctagcagacggaccgtgctgcttccccgtgattgaatctgcattactctgactttgcatacttctttttcatgaactacaggccatttattttcttttgttaactatcttcaagtcttttgttccagtttccattttaaaaaaatataatgtattaatctatgtgcgccacagaagaaaaacacaacagtactaccgtagtagtgttttttaaatcactctgaatttttctaaaggaaaattatcagaatggactagaattgtgacttgtccaaattgttgttttgagagactttaaacataggagataaagtataattaagaccttgcttctgataaagaaaggctcagctttctagtctgtgggtgcaaactcatatagagctggtgactgaatgtgggggttggctaatagtaaaacgtttctaaaacgtgcagcgagtgaatattgtagtctttgcttgtgttgctgcctgtgtagctagcttcattgcaccctttggttctgaacttgcagtgggacagaattgacagtttttgaaatctcctgaaacttatgccgttatttatgtaaaatagcatgtgttcttagcaccaatgactgtaaaatcaaaatgactccgaagaaatctttcagatgctttgtgtcctgtaatatcagattatttgcccccaaatccttttttgtttgtttgaagacagggtttctctgtgttaagccctgactattctggaactctctttgcagacccgggtttaaaggtgtgcaccagtatcaccctcgccaacagtttattcacgtgaatgtaaagaagcacacccaaaaatctgtgggcaaagtggtttcctgtaagaaagtttaagagggtctgaagtgaagttctttcaaaatgttccttaggcaagtctttattttgaaatgaggtaaatattgacatccatctttccccccctctctgaagttattacttaaatagaaaaataagactctgttcaagtttctggcttataactgtagatgagcatccatctgcctaaagtgccctgtatgtctcttctgtgacttctccctgggtcagctctgacagttgtgcccgatggccacgtgacatgcctgcagtaaaatctgaccacaccctcctgccctactattctgtccgactgagtcagtggcctcagactctgcctccccagtgccaggaatgaaggcatgcgtcatcactgctagatttttattgctgtgccatgaccaaaagcaacttggagaaaaaggtttattttagcttaaacttacaggtcaaagtcttatcactgagggaagccagggcaggaacctggaggcaggaactgaagcagagaccgtgaaggagctctgcttaccggctgctgctcattggctcctcagcctgctctcctgttaactgagaaccatctgccataggcagctcctctgttgagattctctttccagataagtctatgtttatatcagttatgaccatgcccagcttttaaaacttttgttgttaacattcttttctgaaaaatcaggataaaggcagcttagtaatacgcttatccttgctctggttgtactgaaagtcaattttcgatcagaagatctgcaaagctgtcagttactaaacaaatctttttcagcaaggaggcacaaaagagagagcgaactcagaacaggttcactttgtgcagactttgtgatatttcacagtgtgtgtgtgtgtgtgtgtgtgtgtgtgtgcgcgcgcgcgcgcgtgcgtgtgtctgtctgtctgtctgtgtgtctgtctgtgttggtaatggagccccaggcctttactgaagggcagcagcactgggctatacttttgccgaatactaaggtcttgtttgtttctgagacaaggtcttgtgtatccccaactggcctgacctcaaagtttatgtggctgagtatgtccttgagctcctgttcctcctgatcccacttcttaagtgctgagattgcaggtgtaggacaccatgctcagttttctatggtgctgggcgcaaactcaggctttttgcacaggcatctcactaagctgcatctgcagctgacactaggatatgaactggactttttcacatagccagaatgcatgtgagacgtgttggatagatccagtcaagcttcagggccccttgtttaaaagataaaagataggggaagtcaatgttttttctctcagtcagtggtcataaacttcagaagtcacacaacagagcttgaaggaggggacagtaagaggtagctgactagaggtagcaactggctagagagacattgtccattgagagtgagtggctgatctttggccttgggtctgtatggggagatcttagtggaagagctgctgctgcatatactatactgaacaggggagctcagcacacacaggctgacagggaaagaaagcttcctttctacccagaggaatatgttttcccgtggtaaactaattccaagatgttcttagtaagtccaagtctgtctgggtatagctccctggcagagctctcacttgacagtgcttgcaactgttggttgcaagttaactggtttagttctcaggcctgaagaaaccagaaatttgcaaaacccaggactttttgttgttgctagagacagaatctagatgagtactctgtacacccccaagccccaaagactcaggcgtggtggtgcatgcctttaattccagcacttgggaggcagaggcaggcggatttttgagttcaaggccagcctggtctacaaagtgagttccaggacaaccagagctatgcagagaaaccctgtctcggaaaaaaaaaaaaaaaaaaaaaggttgtgtgaatctgtgtgtgttgtggggtcagaggatgactcaggaattcattccgtccttccacagtgtggatcccaggaattgaactcaagttgttaggcttaatagcaaatgccttaagccattgagacatcctgctaccctgcttcttttagtttgtaaaaaaggtttgtttttaaatcctgaggctgggtgtagaggcacacctttaatcccaacactcatggaggcaaagccaggctgatctgtgttaaaggctagcctgacctacctgttaagttccaggacagccagggggatatagagagacactgtctcaaaaaaaaaaaaaaaacaaacaaacaaacaaagcaaaaaataaccaaaacaaagtaagcaagcaaacaaaagtcaaaatcgtggaatttccaaagattagagagtgcacacctttcagtgtgtggagagggccctcttcaggcagcctcatgaagtgcttcacatctcaatatgaatttagctttgaataaacattaccctgcaagcttagttttcaaaatcttgcccttttgaatagataatatgtaacccaaagttcaaaagctataaaaaggcataaatctttcttactctcctttgtttcatgctgggtcatctgctctaaaaaatgctaaaactgcttaacaattttctgacttaggtgtcagtagttgcaggcacacaggttttaaggcacacatggaaggcatcctcacgggtaggggtgcttgcaagacggcctgatgactttaggttggtcactggaactcacaaggtggcaggagatgaaaggacctcaaagagtggtcctctgactgccacacacacataataatgaaaagaaaaaaaaataaaaacctcaaactttaaaatggcatttctgtaatttttgtaataatataattgaaactgggtttgcttggtgaatttagaatattcttgacttgcttattgtttattactgtgaaaactaaggaatgtatcgccgagcggtggtggggcacgcctttaatcccagcacttgggaggcagaggcaggtggatttctgagtgtgaggccaaactcaggtctacagagtgagttctaggacagccagagctacaggtacaagtatagaaagaatccctgccccataccgactgctgtggggtgtgtgtgtgtgacagagagagagggagagagagagagagaaagagagagggagagagagagagagagagaggtcatgatctcagtctgatacatctgagattctagaataaggttaagaaatatgcaggtctttggggatcacaaataatgtgtcatttttaggagaacttgcccttttcattttctttcaagggactttcattggcgacttttcacttctcagcgcttttctgtagaaagtttgggaagacttggggaggtaataaagatctacagactcagcaccatatgacacccaacaaaagtggggtcaactccatcccatcctgtgtcttaacttgttcccttgagattaagaacatagactgaaaactgtgaatggttgctaggaagcacatcaactgttttgcttttagaccatccccatacctttaacatagcaaatgaccggagtattacatttattttaattaaaaatttgtgcgccctacccccactgtgtggggaggtcagaggataactttgtagagtggtttctgggcattaaactctggtcctcaggcttacaacattgaagggcaagtacttttacctgatgagttttctttaggggagactgaccttgaactcttgatcttccttcctctttctgcctccaagtactggattatattcatgtccaactccagcagtcacttggcagtttccgaactctggtgcaagagcccaggtgcaggcctgtctgatctgagctgtgactctccgttgcttgggtcggggagtgccccctggtggcaggcagcggtggtgggcgggagaccgagtttgtggggaaggttgcgccggcctggcctctaaatcctttatcacgcgtgcctgggtcgtaccggccagccggttttgagctggcccagtgtacccaaagctagcttagtcgctcccttttcaagacatctggtctctggccgcgcgtgcctgtgtgtctgctttcttcctttgcaggacacttggacctagttgcgtgtgctcgtgggccaggtctctttccttctctctttctccctctgcagggcggctgacctctggtcgcgcctgcccgtgggcctggccccttttgcaggagactggcccctggctgccccagggacgtcctagagtttggacttccggggttggctcccagtctgctgcttgtcacccgccagggcgtttccgtgcccatgcatgggcgcggccctttaaacttcactgttttttagactttgggggtgtggtcacactttctttttttttcttcccgtccgtccgtcgcggtcatcccagactcgcgggtccttctcttgccctgctttccagatgctttggagtcatgagacgggagggcgcagggacccctctgatggccgaggtgatccgaggtgagtgcacggggcaggacttaggatggctggaggagcaacttgctgccctaggagcccaactggcctcctttctgggtccactgactttgggggtaaaccttaatgtgccttaatgtgcttgtgacccctatgtcctacagcctctccacccaccctgtgtgggagctggtgaaattcccagtccagccacagatcaaaggtcatttgtgattagaaaggacaaagccctgtcacccatttgaatgcggctgcaagaagtttgttgcatttactaggagatatgtgcagctgttctgagagaggagatacagattggaaagtttaaagtaccatttgagaaaaggacgtctcggctcttgtttcttaccactttgatttttgccatgttttgggtgtaggtatctgagtgctgttaagatgttgcctttttctgggggttggtgggaataaagatggatggagcctttgaacatcacttcccttcttgctgaactccacagcatctgactcatgcaacacagattctaccccagtctggcctcccctcacattcaccttgattttaaacagcaatttataagaaacccaaagcagtgattccaatttaaaaaatacatatctatgagattaattgtataaacataccaccttgtgttctatagttgtaaacagcaacatgtattttcatgtattgctacatgtattttcagtgtgtcatcgtaaacttaatgcatggttataggctagctatcagaggtatgctgaatttcctgaaatttcttagtctagttgctgcagaaactgaaacagtaccactacatgaaataatcacctaccaccatggtccttactaagattaagacaatttcttctttaaagctttgcttatttattaatattcaccaaagagactttttgaagttacacattgtcacctctgccatctgaaacatggggtggggtgggggggacacaacaaaatcaaacaagccatctttgaattcatcagaaaggagttgggtcttggctggggacacctgtttaagaacttgaagaaaagaacactgccgttttccattgcagatcgcctttgttttgccattctctacagcagaccaaagagtgcaacaaacgaacattatttcagcatagataacgagctagagtatgagaagtaagtattgcctcttggaagactcaaacttttgaaatttcctctgaggaatctctaggtatgtgtgcagatgacataggcttggaaaaattgtatatctgaaaaacacttgcagctgggtgctgtttcagattcttggttaaaaaaaaaaagatctttgaggatacaaagaacctctatttaaaccctgattagttattcttatagtttatactatagagctgtgtaaaataagaatgtgtaaaatactggttttgctagtggataatatgtcaagaacaatttttttttttaaattgaggttagttattctacgattggtgtgtgtgtgtgtgtgtgtgtgtgtgtgtgtgtgtagggctatgttagggggaggtaacaagatctggtgcaagtagctgagctctctgctaatgagatgcataactctagctcacttgttgaataattatgtaggtattgtttaccagaataattccttctgttagtattagtagggcaggaccttagaattgtatggccagtgttaatttgggttggtggatgccctcttgccgtaattttaggagcatttacattcagagcagctaaaacatgtatacttgtttctatttatttttttttaagcttctatgcggattttggaccactcaatctggccatggtttacagatattgttgcaagataaataagaagctcaaggtaaatcttttaactcaaggtttgactgaagtgatcagattcaaaacgggaaagagtgcttcttcctcttacaaaacaaaaccgtttgagaccaggtgtgctgagcactcaggcgagagatcccaagttcaagacaagcctgtgctagacagcaagatcttatctttagaaaacagaaaaagtttaccaagacaccagttgcctactgagttatgttttaggatgctttgaaaacgtagcgaacgtttagaaggtgtggtggagcgcccccggtagtctcagcacttggaagaaatagccgtgagatcacttggtgcacagcggctgtataagactgtacagcttgaccgacattgtgagattttctaagtggtgtttctcattgtgggggtatttatttagaatgtgtacttttatttttctgagtctgcaaaaaatggctctgtaatcaagagcgctggatactctttcagagacccacactgtacatcatgactatctgtcactagagttctagaggacatgacactaccttctggcctgtgtgcctctgcaagcacatagtacattcatacgtgcatgcaagcagaaacacatgttaaaaatattctttttcctaaacttatactgccatctatttgtttcctagagttttttctgggctttgagacacacttatatgcaaccccggctgacctagaagtgtctgcatcccctcatggatacaccaacacatgtcacttgtgttttctaattttaatggaatgggttatatttgggttctttggttccggtttgggttgaagaagctcaaacaaaacagtaactcaaagcgaaaggcagctacttaactaagtcccttgtctgacctcatgggaactgaagcagacaagggaaacgcttccctgctttggccagagtttctcctgcctccctttcaaagagagtgctggtgaatggttggggaaaacattgccctctctgagctggaatctcactcttcaaccatgtctcagatttttacaaagtacctagtcattgtaaactgttcagcagaaaatactaagtttgttagcaggaattacaaataaataaaaacttcggatggatttcctaccagagaactatgtgaaacaagtagcatttatttttgcttaacactattacagatttatgggtaagggagatagtctttttttcccgagcatcagctgcattcactatacatttagacacaagtgtagacttcttcctaggccttcttagcaaagtaaacatccatggccttctgtctttgagtccccctcccctttccccttcttcagtgacagtcttgttcccacagggccaaaaggctaaatataattccctctcctcccatctattgttcctgtgctttagttttgaaagggtgagtctatgcatgtgtgcacctgtgcacacaccttcatgcctaacctgtcggagtcttttattcttcagaataaatgagtgtgttcctttctagtgacttgctggaggcactgacaaggtgttgagcaacaagcctaagatctcactgtccgctgagctagtgagattgacagtgccccggtcgaagagggtgcccatggctggctgggttttgtttttgtttttaattgatttaggtcccttagtccatataaaccactatgggaaaatacactcacattgattgatgatggagacactagaacattcaaacaagcatgggccagtgagataagcagtgcattcaaacatgctgaacatactctgttgcagcatactgatacatttcacattagtgaaccactggggacctgctgggtgatggtgtcttccttttcttttaacttcttgttgaagtataacatacttaaagaaacattcacagatcccaagtatatacttaattttcataaattaagaagaggcctttcagttgctgtctcacggactgtctttaactagtagctttaggactagagatattttgttgttgtttttttgtttttgtttttttgagacagggtttctctgtatagccctggactagagatttttttttccaaaaagattgtttttatgtgtgtaagtgttcttcatgcatgtatgttcatgcatgtatgtctttgcaccatgtgtgtgcagtgccctcagatgtcagagtacatggaatccctggaataggagtcagagactgatgtggcaggtgggcttctgggatttcaaggccagcttggtgtacctaatgagttcagcatagccagggctaataatgagaccttgtctcaaaaaaatagggcttcttcaggtgactttcccagcttgttacatctcctgttgtaggaagccctgcattgttgatttctcagattggcacatctatccagtttcttttgtcactagctgtggatactgccgtgatcttatatctcctcagaaaaatatggcactgttgagcgacagtggcctccaacaagaactttagtccccacaggctctggacttatcagtcttccttctctcttggctctatccagagctttctgaactgatccgaaggttgcctgtctttaggcctgtatctgttcacatttccctgcctcccttttattttaaataattctagtatcacagaatggctcctgggatttcagggcttcagggttgttgttctcagagttttaataacgaggttgcttatgcatgtgaggtgtagaatttgtcacaaagcaacattttaggaaacttgaagtggtcaagaaaatactaacaacagtttgttttgatgcagtccattacaatgctgaggaagaaaattatccattttactggcactgatcagagaaagcaagcgaatgccgccttccttatcgggtgttatatggtaagtgtcctgctctgaaggtcagtgagcgcagccgtcccgctgtacaggcaggcctggggtttcgaagctactctttcctaagatgctgtttctagaggctgtgcacttgtttgctttgaaaatcattcaccccaggaagacttgcacgcgtgctgtggggagcatgtgcgagtctctgtgtgctcagtgattcgctttgttttgtaattaaagttttttgactgattacacggagaaagttgataatctgttaagcctttaaggtgagtggatatgccttccaaagctgctgcttttattaattcataatttgtttagagagttgtaaagtcattttactggggtcaggcccccccccccctctctctctctctctctgtgtgtgtgtgtgtgtgtgtgtgtgtgtgtgtgtgagtgtgtgagtgaatgttagaagatggctttcagggttttcagattatcaagcttggtgacaagcagccatacatgctgagccatctctccagataactctgttctccttaaagatgtatttatttgtggaaagtatttctttgtgagtgtataagcatgcatgtgtagctgtgtgcacatgttgagtgttaaacctggaattaaaggtctcccctctccctctctgctgttttgttatgttagtaccagaatctgaactccagttctcatgattgtgtaacaaggcagcaagagctcaaactcacccctgctttgatacatttgtttgcttacacttgtgaccttgaccctaagcttatggtatctctacactgggctttgccctcagcaccttatacctcctcatactccaggacctgcatgatagaaggaaaaaactgactccactaagatgtcttctgacctccacacatgtgccatgctggccatgcatgtgcactttccccttcccttccctctcctccctcatccatgtgaattaccttataccacctcatactcttataatcttctgttacctagtttggtaatctgtagtttacgaaaattgggctagtagagttagttgaaattgcacctcagaattagattcttttaggtatgtagggtgtctcattaccagctgcctaggccttttggattattctttcctggttatgcttaaaaaagtagcagagagaaaagtttcagagaaaacttgacatttttagtacttcatccttgaaggtctgagatacaggaagtgaattgtgtcggttgaaatctgaattcttcagctgagttgtttctgtctcttggtgtttcttacactggcagcaagtccttaaaaaaagaaaaaagaaagaatggagaacttgttgctcttgcaggggacctgagtttgagttccaaaacccatgatgactacccataactaactgcctataactccagtttaagggaaccaatctcctcttttggcttctagggacacctgcatgcaaatgtacatatgcataattaaaaataaaataaaccccacagtgtctcattgtatagccctgtctggcctgtaattcacatggatgagggaggagagggaagggaaggggagagtgcacatgcatggccagcatggcacatgtgtggaggtcagaagacatcttagtggagtcagttttttccttctatcatgcaggtcctggagatcaggctcaggtcctagggcttggtggcaagtagctttatctctgacccatctcactggctgggcaggtggatcccttaactatgacattggttccattatttgcccaactcaactggggaggagagcctcgactaaatgacaccttaaagagaaagtgaaattaggattatcagggttcacaaaacattaatggcaacctggagaatcagtcctcagtgtgacagaaaaacttctaaggtgtttgtggggtctccccacattctgtccaagagaaagcctgcagtggcccggacagttccacctcagggacagggcccatatccatgaattcttaaccaggcttcccttctctttccactgtcaagtaaagctctattggccacattgtgtgaagccagtggctgcaactccagggtggagaactcagaaaatggtcaagaggaatggtggaatcacagggttaaaaccagaaagaaagtactggataattttataaataggaagttgctcttgctgtggtggttttttgttttgtttgtttttccaaggcagagtttctctgtgcaataattgtggctgtcccggagctccctttgtagaccaggctgatcttgaactcacagatctgcctgcctctgcttcctgagttctagcattaaaggctgcattgctagtgccctgctcattcttctgttttaatttgttgtttctgaggattaaactcagggcctccagcatccaatcaggtgttctgccatcaactggtacacctagcccatggctggtgttttttcaacagtgaatgagaaagataacttcttgtatttgtggacaatatcttgttgtatttggtccattttgatgcacctttaactttgctaatggttatatctgggcacacagaactttagtttcgtttctgtgttttcatggttaatatatgggtttaaaattcctctgaggggtttagccttgcacatcaatgctggttccgtggttaagaatttgccagatgtactggctggttttgtgtatcattttgacacaagttagcatcatcaaagaagaaggaacgcctcagctgaggacatgagctccatgagaccctgctgtaaggcattctctcaattagtcagcgggggcccagcccatcatgggcggtgccatccctgggctggtggttctgagtcctataatgaagcagactgaggaagccaggggtagcaagcagcacccctccgtggcctctctgcatcagctcttgcctcaggttcttgctctgcttgaacagtgccgagaaagtgtaagccaaataaacccctttctccccagcctggtcttagtcacgggggtttcatcgcggcagtagagaccctgactaaggaaactggatagatttggaaagtcatcaagtttattactctcctcatatggaagccagtttgtgagaagaccagagtttgtggtgtgacaggcgtctttcgagccacgatgggtgggctaatgggggagcttggagtagttataatgctttgtggggaagcaggagaaagacttccaataaaagaaagttattaatagtaggaaagagtgttgacatgtgataaagacacttcgaaagataaaacacctaagtgagcaaggcttcttttgtttgagccaatttagttctctggttaaagtcttgtggagatgaacgctaattcctaggaactgaagtcttaataacttttcctggagctgttgaagtttagaggtagtataaagcttgagcagtaatgttgaaacaaaccaaagacctggaaagacttttagctcagcggcagcctagctagccctaacacttgcctagcatgatagggaccccaagtttacattcctggcactgcaggggaaaacaacaacaacagaaaggaacagaaggactggagagacaaagcagtgggtaagagtgcttactgtgcacatgtgagtgcttactgtgcgtgtgtgagaatctgcatttttttaaaagattttatttattttatatatatgatgagtacatcgtagctatcttcagacacaccagaagagggcatcggatcccattacagatggttgtaaactaccatgtggttgttgggaattgaactcagggcctctggaagaacagtctgtgctcttaaccactgagccatctctccagccccgaggatctgcattcttatttcagtactcatctgtgacttggagacttatttttggcctgttcccagtagctcatttctatattaccccatttatagtgttctatgcctaccacatggctggtcgcctcttctcagtttcatgtgtgggacttcttccgacgtccaggcggtgaatctctctcacctgcctatttcccagagttgttctttctctctgccagatgtcccaccttctaatcctgcctcagtttattggccatcagaattttcttggtgatgcttttacacattgtacaagagattatccctacattcatgtaaaaaattgagcatggctacacattagccctcgaattgagcagtcaagagaaatgagcctccagttcagtgacagacttggtttcaagggtttcaagttagaaatacaggaagacaactgatgtcttcctttggcctctgcatatatgtggataggtgtgtatccacacaaacatgtggatgtaacacacacatacatacacgtttatacacatatacacatatccatacataggtacatataatttgcatacatttcacaaacactgaattaatatgcacgcatatgtgaaaaaataatatgcacagcaatacttcctttttttattaggtattttcctcgtttacatttccagggctatcccaaaagccccccataccccccccttttttttttaatctttttaaaaacctttatcaatacaagactctttggtcctctggaaaccagatttcctaaggaaaatgtaaagtgagtagcatttgctatttgtgcaaataaaaacattaggccaggcagtggtggtgtgcacctttaatgccaacagcagttgggaggtagaggcaggcagagttcaagaccagtctagtttacagagtgagtcctgggacagccagggctaaaaagggaaaccctgagtaaacaaaacaaaacaacccccccccaaaaaaagtattttttagtagctacaaaacaattttattattggttttaaaggttttaaacaagggtcagtgggttttggacatacttgttcaacattttacaaaatgccaatcaacttccctttaaaaaaagatttatgaatatggatgcttaccttctgacatgtgtgtgcttcatgtgtatgcctggtaccagatcccctaaaactgttgagttctggttgtgagctgcctaatgtggctgctgggacctgaacttgggttccctggaaaagcaacaagtgctcataaccactgagccatttttccaggtctggtgcttttgttttgttttgttttgttatccctttacctaggacttaatgcatgctggttaggtgctctaccattgagctacatttatgtgtatatgtgtattagtgttatttgtgtatttatgtgcttgtgcaaaccatttgggggctcagaagacaactttaagatgatgttcaccacttgggacccagggatcaaactgagactgtcagccttggggggcaggttcctgtatccactgagctatcttgctgtcttgggatctgctttttaaattgaaagcagttaccattctgtcttttatactgttatcatctgtggttacatcctcctgttaagcttttcttcaggctgcctcagctctcccttaggttacttgtatacagggcaaaacttgtaacatttttatctgttaaaaaaacaaaacaaaacaaagcctccaagtgtatacttaatgacacagcagagtacttacctgtagcttgcaaatttgctctcttccatggttaataaattactctggaagagttgattgtggtaacttgtaagtcccctggtaaatatttatcattgtagttttctaagcagttcttaacagtccttagaatggcttgccttttaagcattcatatggaaaattatggtcctaattaattcctgagactatacttgctcagcagtctatgagtagactcccacagtctgaaaagtggaaagactttatgtctttaatggtgaacttttggccctctggtccacttttaagggattctgttgatttggactctgagcagtcagctaaggtagcttcagggcaaaggaactggatgtaaagtgggactgagaccggtgtctggaagctgagggccagattgcattcagccaccagtgcagatggtgcagtggagaccataagggagagccaggtggatggacacaggctctgtaaacactctcctgtgtaaacctcctcctcgtgtgttataagaggcagagagaacaacaaggcaactgtagacacagcagccaggccccagacagaagccacagatacagcacctcagctgctcatgaggcttacatctctatccactccagtaagcaccccagacactgtggcccctgggatgttggccgagctgccttaactttgactctttgaccatgtgtgattcttgtttgcaaatctgttgctcttatctttatttcagtcctggctttaggcaggatggtttcttgtctataaataagggctgagcagcggcctcctatcagtaacaagcagggtgatcccagatgagcagctaatgcctcctttggagaagatcagcctgcaagggttatgtaactcatggggtatttttaaatggttgtgtccttccacccccaccccgtgtttaaaaattgagatcacagtgctagggatatagtttgagagtactttgagagtacttgcctagcatgcagcaagccttgggtttgatctctgatactgaataaacctgatgtgatgtacttatagtccttaagtcttgagagttagagacaggagtatcaagagttcagcctaggctacatgagactctgttctttaaaaaacaaacaaacaaaaaaaaatctttcttttttaaaaaaatgaaaatgttctgagcatggtggtatatgtatgcctttatgaattccagccctggaaaggcagaagcaggtgggtctttttaaattcgaggctggccctggcctgcatagcaagttacaggcaagccaaggtaacatagtgagatcctgcctctaaagacagcatcaaaaccaaaatgactaaacatttttagagacacgtgtgaagccatcagaaaaaagtcagagaaggaatcaagagtttattttttgttttttgggtttttttgtttttgtttttgttttgtttttttttatatactgtagcagcgttcagggcttacccccaagtccagctcactcatttttactaactggtttctgtagagaggaatatttatttatccatttgtttgcttgtttatttggggggtggttggaggcagtgtttctctggctaatagcccctagctgtcttaggctggcctcaaactcacaaagatctgcctacttctgtctcttgaatgctaggattaaagacatgtgatgttatacctggctggtaacaaggcattcgatattctagacttcaagttcctgtacctaaagtaaggacaactataatattcagtaaaagtaattaacaaagctaaggctgttgaagtgtaaggccatctggtgtttttatttttttgtttcccttggaagcagggcagagctttgtggctcaagttgatttctgagtctcagttctcttgcctcagcttccctggtactgagataacaggcccatgccaccatacctggcaatctgattagtttggggaaaaaaatgagttaggggctgggctcagttgctaaagtggttgaggatctgagtttgattcccagagcccctgaacagaagctgggtgtggtggtaggcaagaaaccacagtgctgggggttggagacaggatttctgatcaccacggtagcctcactgagcttcaggacagtgagaggctggtctcaaaggaggacaacaccggcgattttcttccagcttccacacatgtgtacaacatacacacacacacacacaaaatcaaaccacacgtgcatacaacatacacacacatcagaagaaaaaccaactgtgatttttttttgttgttgttcgtagttttgtagctctgtgttgtgtatattctgcttctgcctaccttttagcagctgaatatgaacttgtattgattttatgcacatgctgtggtaatttggagagagttttgttttgtttttgttttaaactcagtcaaattcttggcacaggaaggactgtgtcatctggctgacatgtgaaaatagttacaggagcttttaaaggctgcaaacattgtgacattttctgcataaagagtatttgcaaatagcttattggtttctcctgtggctgtgttggttgttgggacccaaatgccttttgttgttcttaagtctggctcagtaactggtgttctgtttggtctggacacattatcagagcctctcttaagtgtgtagatgaagcttcaaagtgtgtataagaacagaaatgagaaacacatgtttagttgggctttgctgctggaggccaggcttgtcaggattaaaaccatgcacggtggggtagggatgcttttctaggtttcgagtccttctgtcacccaggtgcaccttcgagtattcaggggtcacaggccctcacaaggcccagaacctgttatcagagacctaaaacaaaacaacaacaacaaaacagtgaggtttgtctagaagggaccctcatgttttggttttcttcctgtaccagagagttgagtactcacggtggctttgtgctcctggccttaggctttctgcctcagttcccaagtagcctggaccacagtctctctgtctgtttgtctgtctctctccccctcccccccagacttgcgctcatattctctctctctctctctctctctcccttcctcccttacccatacaccaccattcttggctgttgtttcattgatttaaaaaggatcttgaaaaaccctaccatcttttccctacgatatttttatgtgtatttatttcacatgtatacatggaagccaggcaaccacttttaagatttagttctctccaccttgtgaacaccagagatcaaaggcaggctttgtagcaagcgctttcacctgcaagaccatcttgctacaggtacttagtttttcctttgtgacttctgtttctgcacagacatgactggccgcatcacatctctgcaatggccatgtaatttttcagttgtttagtttatctggttttataaactgagttgtttccttactgctgggtgtgctgctacatgacctactgatgcctaagtcacctctagagttagtgacttaacacagtaaataaccaggttttttcaaatgtttatttattcactttatatcccaatatctgcctcccccccccccaaccctgtttgttttgtagcccttgccatgttttatgtggtgctggagacagaagccaggactttgtgcatgctgggtgataactctttcagctgaattacatccccagcaactccttaggttaggagttgcagttgcttctctttagtgggtcaggttctcagcctcctggtgtttagtcatctggacgattgtcttcagaggtggctcacacacatccctgagaagccactgttgaactttagcagagacactcctccctgtgtggtctgcttaggattgcccccaccatgacagtttacattacccaggaagagcaaggcggagacaccttctctatgatctcatcccaaaagccccactctgtcaggtcgtttccccctccttttataattaattaattaattaattaatatgcatgggagttttgtctgcaggtatgcctgtgcaccacatgtgttcaatgcccttggaggccaaaagatggtgtctcatcccctggaattggagttacagaccattgtgtggtatcatgtgtatgttgggaggaaaaacttctgagagtgtgcttgagatctggctcagatgtttaagagcactgggcaatcttttagaggtgctgagttcaattcccagcaaccacatggtggctcataaccaactatattggaatgtgatgccctcttctgggatgcaggcggaagactgtgtacataataaataaattgacaaataaatcagtaaatctcgaggaggaggggaaaatctggaagtaaaaagggttctctagaacagcagctcctaaccactgagccagcttttcagccctacactcctgtcatttctgacgctgtgagaaggtaggttaaaggtggaaatacaacgagctcattgaggctctcttggaatctggctgtcatagtagctaatctttgtctgggtaatcatctgttttttagcttcagaatagcaccatgacattggagtgggcattctgtatacatagctgctgatataaatatcctgaaagaatttgccgaggcatttcttgtgtctaaataagcagcagtgctatattataaaattgtgttgatttagagtttgctaaactgaacacttgttttaggatagaaatcacttaatacgattcctcctaagagccacatagagaagagcttcacatgggaaagtcttctcatcagaaaaatgagttgctttgaaagcaaaagctgcagatgtttttttaaaagatttatttccaaagttgagcatgtctttaattctagctcttgtgaggcagaagcatgcagatctctgagactgaggccagtcgtatacagagcgagctccagggcttccaggattacacagaaaccctgtcttgaaaaacaaacagaaaagtataagggtttgcctgtatgtaattatgtgcaccacactacatgcacactgcatacagtgtttgtgcgtggagtgcatagagggtgtgagatcccctgtgtttacagttgtacatagttgtgagctaccaactgggaactgaacccagtcctcttcaagttcagcagctgctcttaaccactgaaccatctctccaacctgctgacaaatatgtacagaggtttagactaaatctctcagtttctttcagggttaggattaagtcttatttttttgtatagtcattccccaaacagatttaaaacattttttaaaaattcatcattgggaatctagagtgttctctcaccacccattgggggggaaaatgctgtattactctagtctttgaattgaacttgtgttctaagactagcccacagttattaatgaattaaatgctactttgttttgaagtttagaaggaaataagggctttacccttttggtatttaaagaaaccaagaagctacggtcttgtggagtaaaaattgccttaaattgctgtttaaggaaaaacgggtgtatttgtatagaggagatgatgatcttggaaagctagagaaattctgaattataggttctctggatttcatttgaattatatacacacacgttcatggacacacacacagcaaatccagctctttcgccttattgacttacaggtactttggttttacattttgttttggtgattcattaagaaatatactgtcttagagggtttttttttccccttcttgacggttctgtttaatatttttttgtaaccttcaggagatctcttgtctgaagttttatactgtggtgtctgttttgatcactataatgaaagttgcagtgagtgctctttatagagttccaggctagccacatggccccatggtgaactctgatcagtcagtcagtcagtcagtcagtcagtcataggactacaggtgaacccttatcaatcaatcagtcaattaatcaggccagctagaagatacttggtgaactcttatccatcagtcagtctgtcagtcagtcaggctagccacaaggctacatggtgaacctttaccaaaaaaggaaggaaggaaaataagcagtttcgatgaaacagtgggtctgatcatcaccctcttgttacctgaacaggtgataactgtccatttgaaagcaagatgttgccttttcctaggctcaccaacatgtttgtgagtctctggtatgaccccatgggtggcatcattggttttatattgctttgggctctttacatatatccaccaaggctttttaccccaaagacattgcaaaaggacccagatgaccgtgaactaaacctctctaaattgaaccaaaataaaccttgccccccccccccccgtgtaaaattattatcctaggcattttgtcacagagatggaaatcgaactaacacagttgcaaattggggcaaaacctaggaattgtaatttttcagccataattctgtggccttccacacatagccaaaactatatatcttaaagaaggctaccaggaagtttatgggttggagagactccaggaatgcagtgacatgaacataaatgctgaagttctcaggtcttttttagtttttcgagacagggtttctctgtgtagccctggctgtcctggaactcactctgtagaccaggctggcctcgaactcagaaattcgcctgcctctgcctcccaagcgttgggattaaaggccaacactgcctcaggtctcatcttgtcctttactgttgtagccaatagggctggtattggaaaaagtgataaggcctggttctcacacaaccaaaacctgattttgattaaaaaaaaattttttttttgttaagacatcaagcatatggggcactcccaggctttattttgttttggaaataagtaggtagaaaatttcatggtgttcacttgcgtgttcaacctccacaatgctgcttcacaggaaatatgattcaaagtcacttttctcttcttgagttgctacttgctgttttgtctgtaccagctagcaggtgatccacaggaagaagtggcattgtggcaggatttttaaatttagttttgggttttggtttcagcagtactttttttttgtttttgttttttttaatagagtggagaaaaaaaaaccaagattttattagagttattgggttttagttaattttctagcaccgaaacatacctgagatcataccttgtgctaaggggagcttcatgatgggctgtgcttttgtgtttatgcctgtgctcagtttgtgctggggcttttggggcctgtgacgaggggacagtgcattagggcaaggatcatgtggtggagccacctgcttacttcatgtatattcagaatggttgaaagaagaaactgcaaaatcccaaagcctccttcaaggacacccccagtgacctaaaccctttgattcctccccccccttctccatggcaacaagctgaagaccagactttaatacccaggatggtggaggccatgccaggtccacattagagcaaggggcaggagacacctggaggttataagggtattctagtttcatggcctagtttctgtggttgtgataaaagatctcaacaagcaagagaagaaacaagcaaagagagaaaggggcttacttgacttacagttgcaagttacaatctattattgaggtaggaacttatatcacatttacaatcaagagcaaaaagaaacaaatacatgtatccttgcttgtctgcttgctttcagctagcttcctcctctcttttcactgtttagaagccctgcctagggaatgggtgtcttccataatgaattgagtcttcctataaattaacaactagggtaatccccataggcatgcctctcagcaagaatctcttcctaggtgattctaggtcttgtcaagctaatagcatcaaccagcatagcaggaatgaagtaaaatataaaagaaaatatttttaaaccggttggatttttaaaatttacacttgttttttgaagatttatttatttatatgagtacactgtaggtgtcttcagacacaccagaagaggcatcagttcccattacagatagttgtgagccaccatgtagttgctgggacctttggaagagcagtcagtgctattaacctctaagccatctctccaacccaatttatagttttgttttgttttgttttttaaagatgtatcagtttattttatatatatatatatacacacacacacacataccagtgctcaggcttcacccataccaggagagtcagatctcattatagacagctgtgagccaccatgtgttcgccagtctgtagtcctaaattatagtttatatgaagcagtggcatctttttttttcccctaaataaatagtaatagaactgttgttaggctctgcttaaaagatgtatgtgttgaatgagagtatagatgatatatgtaaattcattcattttacttgaaaacttgataatgtaggcaatttgataattaggtaagacttctgagttcgaggccagcctggtctacaaagtgaattccaggacagccagggctatacagagaaaccctgtctcgaaaaaaacaaaaaacaaacaaacaaacaaacgtttaacaacaacacatttcttagctaggtgtcagtggcgagaacctttaaccccagcactcgggaggcagaagcaggtggatcagtcagccagggaacacatttctttctttgggggattgattgacattttgctggacctttttccttactgccactgaggataaataaatatttgagcattctgttaattagtgtatcacattttccattctgtgactaaatacctattaagaacaacgtgatagaaggatttattttggctcatggttgaagataggtgagcccgtcatgtaggaggatgtggctggcattcttctcagctgttaaggaaacagggaatcttgtcttcactttgccctttttatttgatttaaaacctcagcccatgggaaggcaagtcatttatctttagataaacctctctggaaatgccttcagacactcacagaagagcatcatcgagattactccaatgccatcaagttgatagtgaaggttaactatcacaagctgtagtctgtgaagagagtaaatggaattaaattccagtaagaaaccattcagaccttgggggaatggtccatttataactgttcaaacagaaaataagtggaatgtcctctcgaaattgtcaaatctttataattagttctaagatctagccttatgtttaaaaggttgtttttaggtttgtttactctgtgtgcctgcacacacatatatgtatagagaccaaaagtagaaatgtgtgtcttctcagttattttccaccccccccccctctctctctctctctctctctcttttttgaggcaggatttctcactgagcccagggctccccagtctggtcaggctgttctggccactgcacttcaggcatctgcctgtcttctgtgctccagccctggggttagacacctgtactattacctgatcatcttttacatggaatctgggatctgacttgtagttctctggcttctattgtaatccctttatccaggcccctccccttccccagctgtggtcttttaatccttgttttgttgtcttatttcgagacaaggtttctctggatagccctggctgtcctggaactagctccatagtcttgaactcagagatccacctgtctctgcctcctgagtacgggctcagcagcctttgttgaggctacaaaaacaaacatttctcaggaggcttataaaggaaaaacccacaatgagcccatatgcaggtgcaggaagtgctgcccagtggtcagctcttactcaagccattttagacataaaagcacatattggcctttaatttgataggtcctatgtaaagctttgtggaattcttaagattaacaaacctcatacagaacacaccaagggatgtggtcagcatgaccctgttctatgtcaagttatatcaaatatttgcatattacagcaacaatataaaatagctggcaggcatggaacagctatgctgggggtgcagacctcaacaacaagtacattgagttcaacgtaataggcaaaaccttagagcccatccatttatgcttggaccaggagttaagagattggagacaaagccttcacttcagagtgcctcctgccatgaaaacagcttccacatacagtattaagcactggaggtaagaaccctgtatagaggtaatggtagtggcccacaccttcagttgtagcactagaaaggcagaggcaggggcatctctgagttcaatgccagcctggtctacagagtaagttccaggctacacagagtaaccctgtctggaaaacccaaaccaaaccaaaccaaaccaaaccaaaccaaaccaaaaaaccacaaaacaacaacaaaaaaaaatatagaagttcataattaacttggtaacgttttctcccttttcagccatgtcttggctccagggatgaaactcagtgccacgcgcaatgtagaacctgtgcttctgagttacagttctaacctagattggaattattctattgtgatctaaaatatattttccatagatcagctttggaatttaatttagttttgatctttttatgtgtttaactgaatgcgtgcgggtccctggctcctgcgtgggagctgggaacacctgcagccagtggcagatggtgggtggtgaaagtagcaacagcttgatagatacaggtgactgacctctcaagtgaagaggcctcagaacaataaacacggaggaaaacactgcagggcacagttggcaaagcagggggtttggccaggtgtgatagggagttcctggggcaggtggatctctgcaagttcagaaccagcctggtttacatggtgagttccaggtcagccaaggctatgcacacagctcatgaaaactctgtcaacaaaaagaagaaaagaaaatacgtttttgaagtattttaccagaggaagaccgaaacacaccacagttctgaagacagaaggagcagatgagagtaggagcagatgtagttagtccagtagcaaactttcactgtggagagagtgcagttcagtggtacacctcctccacccctccactcccaccctgtggcctttgcagatctgggttcaattcccagcacccgaatagccgttcacaactgtctctaaccctgatacctcctcctgtcctcctcaacactgcatgtacacagtacactgatatacacggaggcaaaacactcatagcataaaaataaataacttaaaaaaaatagcttgggatcagtgagattgcttagcaggtaaagccacttgctgcataggtctggggacttaaagagtttggcccttgggggctggagagatggctcagtggataggggcactgactactcttccagaggccctgagttcaagtcccagcaaccacatggttgctcacgactttaatggagatctgatgtcctcttctcgtgtgtctgaagacagtggcagtatgctcacatacataaaataacatacattaaataaataaataaataaataaattctttttttaaaaaagctaaattaaaaaaaaaaagttggtctttggaactgacatggtagaaaggagagaaccaacttcacaaagttgtcctgtgacttccacaagtgtcctgttggccatttcacaagtactaaaataataaattcatcgactccaagttccactttaccccactccagtcagcagctccacctccacctgtccacttctgaggatgctcaggaaggagaatttaaagcatgtcactccaacatctggatctggaaaatgtgtgttttaaaatgctgcatttctgggcacaagttgtttgaagtgttggtgtggcagggagaaatctctgacaggttgagacaagcagttacttgtgagaacatggctctgcagattggctgcagcttgtgcagaaatggcttcttggtgacagaactgtgtcactgagaagtaaaaatgcccttttcttttctttccaaatgtaggttatatatttggggaggacaccagaagacgcgtatagaacattaatcttcggagatacagcctatattcctttcaggtaaatgtgcaggttatgtggtagatgtatttgatcagactcttaccaggaaccttaaaagaaacaaaacaaaacagaaaggtgaagccctggcaggaaggcatgttaatgatgtaacaccatagatccaagagtcttaacagtgacactgttggaatgttgtcacttctggcctctgtttggtagagactggtgactctgactacacacacacacacacacacacacacacaccacactcatgctccacttgtgttatcagaatgtcaaaagtctcccagttttgccttttagctcttcgaaatggtaggggtggagtaggactttgctgagaaccacactgtgatgtagctaggggagaatcctcatggtactgtgcccattgctgccccaggttcctgtgcaattgatcagggagtttccctactcagcagagtttatgggacaacacctgacgccttttcccaagagcaccaccagaagaggtggtgggtgcggttgaggatgtcgacacaacctgtaacagcatgtcaaacagctctgtgtggaggcgtcaggcctcgatgctccaactctgtgagtggatagcagccttacctcctagctagtgtgatgatcttgaaagaattgtaaaggaaaaaaaatgttttaaaagctgtgtgctgattaatttggtgtcctataaatgaactctggaatgtcttcctaactgaagacaagtctccccagatagttctgtggaaccctctccatttgaaacagggcttccattgttggggcaatgttcagattatggtgaaatggtggttgaaggccatgactgagccagtgtttcttccctgctgcctagcagactgtcccaagtgttctgtgatttgaggtgtgtaggaagagagaaggcgctgaggtgaagtgagccagccactcatcttttcaacttgtaacagcacccatttgtgtctgttaggagcaatttttgcatctgtgatcctagagtgagcagtaggcatatagttctgctgctacaacacagctgtgaccttgtttggagcgttctctccaaagtgttaagcccttgttgccattctcatagcttagaacacaaggacgcataatgtgaacaagcttacttgctagaacatagcacagacagcctcaagctgggttccgctaaagcctccccagatagtccttaatttccctttctcatattttatcattttattttttgagacaggctcttacaggccttgtgtcctggaaaactctgtgtagactaggctgtcctcagactcagatctgccccgcatctgcctcctgaaggctggaattaaaagtgtgtgccactgccaaggaccaacctcagcttggagagggggttctgagagatgggatgtctgggagcagcaaaaatgactggtccaaatcatggtccaagctgctgacgcctttgttctgctgagatggttttccagaccgacctccccccccccccccccgtgtgtgttctttgctctagacagctttttcttgctattctaaaagctcctagtcgagatagctaactttctgctcgagacagttttctctgtgagtgaaaattacaaaagctctctggatagctcatgaattttctaaccaaagtcagaaaaacagctataaagaaaatccttggatcaactcaaaattctaaaagtaattcttgggttttccaatcaaaatcagaagtcagaaagtgtttaaaagaactgtgttcgctcttcaaagagccttctctggatagctgctagaaaactatgaaacattctaaaagagctgtgctcattctccatggattttcctattaaaatcagaaatcccgttagaaaaaaaaaaaacctttatttattattatatgttagtacgctgtggctgtcttcagacacaccagaagaaggcatcagatctcattacagatggttgtaagccaccatgtggctgctgggatttgaactcaggaccttcagaagagcagttaatgctcttaaccactgaaccatctctccaaccccagaaaaaattcttgaaggcagagatctccagatagctcagctcttgctaggaaaaaaaaaaatctaaaaaagaactgctttcactttcttctagctcatctcatgcagaccctaaaagcccactcttatttacatatcaattcagttattccaggttcccttttaaccatcccctgaatcagcattccatgtctttagctccttgactcttagaaagagacagcaaacataagcacagacaataagatagctggtgagacccagctctggaaccagcattctacctaagcctggacctaaattagctctgtcccaggttggccctgaacttgggaatctgctggcatttgtaagcataaacaatgacaaaacaaaaccttttctttccttctttagcatctatctgacaagctggatcatagtgcagctgcttctgttcctttagatgggtgatgcccctcatataattcatattgtgtccttagattttcgaatagttgagaaattacatatttttgaactcatgtttttagagttcttttccattgccttaaggaccgtcctgaaggtcccagtgtttaccattttgctgagacaatagccacatctttgcctatgctgtccttattatcatggagtcatcaatattaacagagtggacattcctcagaggaacgccaaaatacacacattattatacaaacaagcttaaggccacagccgccatcgacactcatggagcccatgcttgctggctctgtctcgggggcaggacatattattctgtccctaccaaggccatgctcgacttggcagtgacaccgtgaccagcctatttcttttccttccttccttccttcctttccttccttccttccttccttcnnnnnnnnnnnnnnnnnnnntctctctacaactctggctatcctggaacttactatatagatcaaactcacaaagctccaccattctctgccttgctaatgctggaattaaaggtgtatacgaccatactcagtatcctatgatatcttactaaattgtgtcagttatcttctatcttagtgagggaaatagtctgaaagagcacacttgtattactgttgtctgtagtaatgctctgcttcttagatttgttgtactttttgtgagagagtttgcattgtcccctgactctcttgtttctacctcccaaatgctaaagttacgggtgtgcaccacaatgcccatcaccaggttgtcaatggcttactttggtaatcagttagagaagtgactcttaacctttgctgttgctgtgtcctttacagacttgagccttactctgaagaaaaatagcagtacctgtgctattataacaggagttatgtgcccaaaagaaaacaagcaataaataaataaataaattttaaaaagcctgccctcacatagtttgtacaatatccatagccctttttctcctttttaaaaattgataaatacaatttgttaacagtcaaacaaacatctaatacatgtgtgtggagtgcttagggaatagactcaggacattatacaaaggcacacactgtaccatggggcctgtaccccagctgaaaacactaatctgacttgtacagccaggtcttacacatgtgtttgtgtatgtgactaccacactttgggatatagaacatggctatcaccccaaagattccctcctgccctgtgcagtcagttatcaccctcccatagagactgctcttaacactccctttctactgtcacttaggcttgtttgctttggatctttgtgtgtctggaaccatctagtatgcattggatggctcagtggctagagcactttctgcacaggtcgggggactagggtttagattcttcacagcccacataaatggtaggtgggtatgacagcccaactatcatttctgccttggtaggcaggcacagtgcatccctagagcaagctgactagcaaggccagtcatactcatactggtgggctctgggtttgttgagagatttttgcctcagtgaataaggtggaggagcaattgaggatgattccctatggctccagtgggaggactggggtgtgttgggggcctggatcttcaagaagcaagcttttatgttaggattgtgtaaggcagggcttgagtaaagtaggccttgagccattattattcttgaaaaaaaaatctatgcatcaaattctttgcatggttgaattggtgtgcctttaactaggttaactaagttggagaagtgttggccatgttaagaagttaatgcaagtagttaactactttcaaagttatgcattacttcagtttgagagttcactctctgttgattgctgatagggccatacagtatttgagtggaactatctgttttgtagttataagcttggtgggatgctattggaattctaacccttaagaacaggaaaaggttacccagttaaatttattcaaagttctactataactatgggagcagaatgcttgtttctgtagtgaacagattatcgaagcagagcgagtttggttttgaattctagtcagctttgtcttggggtgagtgtggtgtagaacattaacggagtaacactttgggaatttcagagatgctgcctatggaagctgcagtttctatattacacttctcgactgttttcacgcagtaaagaaggtgagtgtcttgcagaagatgaattcttctccacagggctgttagagttccttcagctgtgtaaggtaccggttaacattaaagtgatcccaaaccaataaacagctcattctaaatttctgattctttctatgcttgaatgggatggaaagggcacttacagacaggaggcaggctggggttgtcactcagttgggtgagcacttgcttagcatgagagaggccaagggtttaacaccagcaccacaaaaacaaggcacaagagagttaagtaatttggttttagctagagacagcgttagctttgagtgtacctcatttaaagaaaaaaaaaaagttgaatactgttcccctccaagttatttttatgtatatacaacacagtaattgtcgggtgcaatggcagtgtcagcttagcatatgcaacatcctaagtcccatcctgggcaccagcaatacagtaactgtgaggctcagttttgtctctaggcgcttgactttgaattcaacagaatttggacaattaatttgttacaaagttttatataaaactaagtgtgtcacagttgctttgtcagaaagttgcaggaatgtggggggtgtgtggcataggggcttagcctttgaaaatgttcagcattgcatagagtactttctaggatacatcctggttcttaatagaaaattggcattttccttatgcctttgttcataaacattttcttttggattttaggcaatgcagtatggcttctttaatttcaactcatttaaccttgacgaatatgaacactatgaagtaagttctaggttactgatttcagtctccctactctgcactttaccaaggtgtcagtgatcaatatatctgtatttcatcaccgctttgtgtgtgtgtatgtgtgtgagagagagagagacagagacagagacagagacacaggcatattggtgagtttttgaggtcagaagacatgtttgcagagtcatttccttctcttcacttctacatgggttctggactcaaactcacaccctcagacttgcgtagcgagtgcttgacctgtcagataatattttgatggatatatgcttgtgaaatgatttgcagattcaaacttgttcacacatgtgctatctagatgtgctcaggacatttaagatgcaggaacaacctgcgtgtaacacccagaacttattactggaagtttaggctctcatcagaattctatttgtccatatacttttcaatctgttatcctacctaaagaaataaggagaaaataaattttaaatattaagcaatatgacaaggtgcttcagaggttaatggaatttgaataccccaagcccacaaaaatattaggtgggtatgatgtcctgcctatctatcagtcatatttgggctcagctgaatgatcctgccctaatataggaggtggaaagagaaaacagcttatgttagccttgggcttccacatgcttataccacacatgtgcacccaacatacatacatacatgcatggacacacatgcacatgaagaaaaaaataaaataagattgtacggtaaggaatagcacatctttaactcttagttccgcattcgtgattcttagtggtagtttgtaacaatgatcaggtacatctttataaagctcagtttaagttctgtttttagtgttggtgaccttcctattgtgatgtggatataggtttgaagtccacagggtggacacagtaaggtgatatcttgctgtatctagtgactgctaaggtatacttggttgttatagcccaattgtactatctgtttaaagtaattaaagctaagcagaaatagccaggcatggtggcaaacatctttagtcggagcactcagaagagatagaactctgcaagttcgaagccagcctggtgtacatggtgagtttcaggccactcaaggtttcacagtgacaccctgtcttaaaacaacacacccaaatgttttaaacaaaagagtgaacattttattggattctgcaagttaaaaatctaggagcagagctggggaggtgtcttagcagacaaattgctctctgctcaagaaagagaacctgagccgggtgtggtggcgaacgcctttaatcccagcactcgggaggcagaggcaggcggatttctgagttcgaggccagccagggctacacagagaaccctgtcttgaaaaaccaaaaaataaaaaaataaaataaaataaataaataaaataaaaaagaaagagaacctgaatttagatccccctaacacctgtggaaacaggccaaggtcgcagtaaactcccgtcatgggaggtgcagagagcagtatccctggggctcactggtcaactaatgtaactgaatcaggttctgggagaaaacttgtttcgatgaacaaggtggatggcctgtgtatacacagcgtgtgttcaagcacgcatacatacacgcacatgcacatacactggcctatatacacactgtgtgtgtgtgtgtgttagaatgtggaatgttattgatagactgaattctctgtccctgccaagagctctggtcctggcctgccttatcaaatgaaacaatggagcaggagaacatgtccaggcaggcaaattcataggtatcttctatatttttaaacataaatattaagaaaaacaaaatttctagggttccttcctccaaatatatgggtaaggcgctgtattaggggcccttgtagggagggaagcgtatagattctttgtgttctgctgtggctatttagagcgaggagaggctctgcagacagcactccatgcgttcatatcccacatccacagataactagctttggctgttatttctttttttttcttttttatcttttggttttttgagacagggtttctctgtatagccctggctatcctggaactcactcagtagaccaggctggccttaaactcagaaatccacctgcctctgcctcccaagtgctgggattaaaggcgtgcaccaccacgcctggcttggctgttatttctaaagaagacctatgattgaagtctgagctattttcactgcaaagataaagcacatcctggggttcactcctgtcagcgagcggtatcttgtaatagcactgtctctaaagtgcaactccttcagtgactgtgtaaccgaattactaagatcctttttttttttgcttgtccctatgtcttggggctaggtagagagctcagcgcttaaagtaattgctgtacaagcatgagggccagaatttggattctctagaagccacacatgccaggcagcaggcatacatggctgaggcctctaaccccagcactgaaaagaagagacagatgatccctggggtgagctagactagcctgagttaaagtctgcaagctctagcttcagaaatagtctgttccaaaaaaaaatggtatagaaagtaattgaacatcagatacacacgcacacacacatgcacacactcgcacacgcgcagaatataaaaaaactgaaaatggcaattggtgcatgaagtacaatgtttctattacctcaattgttaaagtgatttttttctctcctggcactgattccgtcacagtccattggtttttacttcttaaaagtctgcatcatgctgggcgtagttggccatgcttgttaccccagcccttgggaagcagtggcacagagcttggttgagtccaagggagagcatcttagcaacttagcatcacagcaagttcagacctgccaaggttacatggagagattctgccctagaaaagaaaaaaggagggtggctagcacctgaagagtgacatccatggctgtatcctgtccagtgtgtgtgtgtgttgttgtttcttctctgtggagagagtgcttctctctgacacttttattctccaggctaatgacccaagcaaagaaacaattttaaagtgattgacaccagggaagtcacccgttccctggggatactcaaagcaaaatagagtctctctctgtcttttaataaacagcagacactctaaagacaatggctttgaaatgagtgttgacaagggaggtggaaggagatgtggttcagagttaattgtgctggtctcttctttgcagaaagcagaaaatggagatttcaactggataataccagagcgatttcttgccttctgtgggccccattcaagatccaggctggaaagtggtatgcaaaactctggaatccaagtagcttcctctttttccttttgcaatagacttctgagctgggcactgcagcatttgcctgttgtcccacatctttgtgagtacgagtaaggcaggaagacacgttgagtcctgacttctggtgtgctgtaaggttcgggtgtctgctgggctcagccttgttctgcttgcttcctgggagggaggcctttgagccgcctgctgggggaatgacccaaccctgtttagaaagagaccaaagaattaagctaagcttgactcagtcttcacgctttaaccactcttggttatttgagcacacttctgcctggatgttaactttttaaacttttggcttttacagttataaaattggtattcagtccctagtccagacattgtttccacccacttttgggtgggactgttttccattgtgttcttcctgtgtgttccaagctttggtcatctctttatgtaggttaccaccaacattctccggagacttatattccatattttaagaatcacaatgtaactaccattattcgtctgaataaaaggatgtatgatgctaagcgctttacggatgctggattcgatcaccatgatcttttctttccggatggcagcacccctgctgagtcaattgtccaagaatttctggatatttgtgaaaatgtcaagggtgccattgctgtgcattgcaaaggtaaataagcagctaggttgggcagtgtgcatgtgagagtatatatgtagatacgggttatatccttttatgttacatggcaagacaactgtgtttttgaaagaataatttaagggttttttgtgacatcattgtggcatgtgtgttttagagagagagagagagagagagagagagaccaaccaaagacaacatgtgggaatcacttctcagttctcttctaccatgtagttcccaaaaatggagcacatagtatcaaatttggcagcaagtgcttttactagttgatccatctggcttcccagaaagagcgattttaaaatccttaatttgtatatagagtatagtaaattatcttcacgagtaagcctaccacagctttgttttgaggcaggatctcatggagcgcatgctggcctagaactcccaacgcagctgcagacaccacacccagatccgccttttacagctgtgtgccatcatcctcagtccttatgccatgctggggactgaacacatggatctgtgcttgctaggcaaatgctttacaagcttagccacatccccagcccccagcctaccacagcttattacactgaaatgtgtatatttatttcttctgtctgtcgtgtgcccatgagatgagtcctcaggttgtcagcagtagaccaaagtcttgcagcagcttggtgtagactaagatgtgtttcagcagttatagcagtttctgaatctaaatgttccaggaataactgtaatgatgcactgtgtgaatatagtagagtgtctttaactttaatttaaaaattaggtaattaagaaaacaagggatattaaatggcaaggttaaaaagaagaaccaccaaattaatttccagcgctaaaactatttttagttaggaatgtagctataatcacaacattcaaatgttcagtttgcagtggaagatgacaaggcataccaaaaagtaaaatggagccaggaaagtatgaaaaacccacaaaaactattcttgacaaggatcagatagtacattttccagacagatgatttaaaacagctacctcaacagtgtgcacaacgaaaagaaaatgtgggaaaggagggtaaaaaatatgtgagcaaaatccaagtgtcaatagaaaacaaaaaccatgaagtaaacccaaaatgcaattctgaaaatggattgaaaaacgtactggcagggttccaaaggagacctgaataggcagaaggaagaagccaagattgtgaagagcagagccattaaaaagacaccaggagaacaaggagaaaaggattgtcaagaaaagaaagtagcaaagtgtacagtttggggacggagctgggcagaaccccccccccccatgtgcaaagtgggaggtccagcagaggagagagcagaaggaggcacatggcctggaaatatttcccacttttgggaaaggcatgattgtgaacattctcaaaactcagcaaactccaaacagaacaaactcagaaactaacatgaagacactttatgatgatactgtctcaagctaaagacattgaaagaagagagaggaaactcaggttaccaattctgccattagaaactgtggaggaagagccctataaaccttcaaaactccctcaaaatagaagtaaaaccaccctcagatggtcaagtgctgggggaattgttacaacttgacctgtacgatatcagttaggactctagacagtactcaaagccacatgaagaagcaagtgtctactgtagaggttgatatgtacataggttaaagtctagtaattgcttgtaaaatattgtcactgttttgatataaatactataacacataaaaacagaaaaccattatagaaatcaacaaaatccaggtgtggtcagttcttcacaaagtttaacaagaataaaaataagcacaaacctttagttttgtgtttgatgattgaagataaaagagaagaaaggcttaagttattgcatgagaagtggcagtggggacaatactcgtctgtagacgaggtaagagaacctgaacttggatccgcatgtaaaaaggtaggtatggctgcatgcacccctaacctctgcaaaggggatgggtagacttactcagcttactggcctgtccatctggctgaatccagtgagatctaggttcattgatagaccctgtctcgaggggaataaggtggactggtagagctggacatctgtgaatatatacacgtgtgaacaaccagtaagagatgactgaatagccaacagaatgttggatgatggaaatgaaatagaaaattcccaggaacaaaacaggccaatacagaatcaccatgagatgtgggcagtgggcacagaatctagaacactgagaaggtaacagagtttcccagctaaggaagaggacctgatgcgtagcctgtgactaacatcaattctctgagattattcaaatttgaagggaatggagaacactgttctctaaggccaggattgctttgctaccaaacacaagcaaagaagccgtctttgtaaaagccacacaaggtaaaagactcatatggagctgggtctcgattggtagagggcttgctttgcaaacgtgaagattgcagtttgatttgcagctctggataacccatggtatagatctgcagtcgtagacacaagagggtcagagatttaagattatcctcagccacatagtgagtttgaggccagcttgtagttcaggagaccctgtacagtagagtacagtacagtacagtacaatacaattcaccgtaccaaaccattttcctggaactacagaactaaagtaacataggaaagtcattgtaagtctccacagtaactgtgaagctcaaaaaacacataatcatctctgttagtataggaatagcatttggcagacttctcgccccccttttgtgataaaaccactaagaacaaaatggaactggaaggaaactacgtccacacagcctctcactgaaaccttttctttgcttgccctcatctgaggtggctttcctaacagctacttcagtcttctcccatacagttatagcatgtttatatagagatttattaaaagaaactgtagtcactgagtctctcatctgtactgtagctgcctaactgaggcgtgaatgcagggtgcaggaggacctccttcgggtggaaggctaatctttttgttctattcagatcttaaatggattggaggagcactgcctacattatggaaagtgatgtgcttactaaaattggcactggatgaaatgccaatcttgaccaaaattccttccaagttgatataacacattaaccatcatgggagttaagataatggtctccataagaggaaagaaatagggctggagatgactcatcatataaagtgtttgccaggcaaatgtgagactgcagttctggtctctagaagacacagaaatactcggtggccttgtagctcaccagtaatttcagcctagaagggagagagatggggcatttccagaccagactggccagccaaacggccacagctgttaggttcagttcagaaaccctcccttagtgaataaggtgtagagcaatcaaggacgactcctagacatctacttagggcctcctaatgattgtgccccccaccccaccccatacacaatcaaaaacacgcactgctggattatctctgatgcaccagctcccaaataatgacactgacaccttttattaattatgaatgctttaagcctaagtttaggcttgttcccagctaactcttataacttaaattaacccgtttttactaacctatgttctgccacgtggcacacgacttctcctcagcaccagtacttgcttcttctctgcaactggctggcaaatctctccaaccattttttttccaaagttcctatctgtgtcggatggcccacctgtcctctccagcctagctattggctgttcagctctttattaaaccaatcagaaggtgctttagacaggtgaggaaggacagagaaacatcttcaaacagtatcctaaaagattatcccagcaaacatgcacacatactcacatgcacaccacattgcagagacacatacacaacagaataaagagttaaaagaggtatagtttaggttgaagtgcttgtctaacatatcccagggttgggttctgtccctagctctcctgtaaagcggagtgtgaactgatacaaatgttgagtaggtaatactgttggatatggtaacaaatgcaaagcttgggcagaaaacagcatacttaaaaatatttgtatttgtgtgtgtgtgtgcgcgcgcatgtgcacacgcatgcacatgcatgtgcctgagtgaatatgtgtaccacacttgtgcgggtgcctttgaggccagagggtatttgatctcctagaaatggaattccaagcagttactatctgggtgctgggaattgagtctgggattttaggtcctcggtaagagtagtaagtactcttagcgctaagccgtttctccagctcaaactccacatttcttagaggtccctgttcagaaagtgattttcaatctttggctttacattgatgtaaaatcctctggggggacttcagaagaccctggattcagtcttctgctcctaggctgttaccacttaaaccttgagggtcaggcctggcacctagcctttttttttttttttttaaacttcttcacatttttattctttgtgcacaaagactagcatgatcggttccacttcctagtcagtcgaatccattcaaggtcgtttagtccaacttaatgaagcctatgtccttcgcatactgccggaagcattggaggcacatgttcaccccgtatttgcagatcagatcgtggcggttagagcaggcgcggcaagagcaggaaccctggccgaacttccgtgggtgactccagcagagctgctagtgacccatcttgccttcagacgcccgacaagggaaaaggggcacctagccttttaaaacctcttcagattgactcagagaacctctgtagagggaggcaataccctgagaaggctgtaactttttttttcttcctcctattcagaaatttctggaagatgtgcaaacagatttcattgatgtggtttgtttttctagctggccttggtcgaacaggcactctgataggctgctacctcatgaagcattacaggatgacagcagctgagagcattgcctggctcagaatctgtagacccggctcagtaattgggccccagcaacagtttctggtcatgtaagtgtacttgaagcttgtcttctgtaagaaccagtggctgtgggatgggggtggaggcgatgtccttacggaaagctgtatttttgatgttgtttaaacactgtaggaaacaatcaagcctctggctagaaggcgactatttccgtcaaaagttaagagggcaggagaatggccccctcagagaagccttctccaaacacctttcggatgctgatgacctgtccttaaatgggcttgagaatcaagacaatcaagagcctgagccggtaatggaaccacctcggtcacgctgttgtaattgctgtaaatgcttttgagatccttgtagggcatggcgaaactgtaggtaaagcttaaaataaagtggcttttaggggctgataccacacagtcatgtttacatatattcataaccttctctagaaatgtttgactgaaaagaaagttgtgtgcttatagaacattccgttgacttcctaaacacagatggcaattatcagtggggagtaagctcctaagacagagctgcttacactccaacctgagtgcgccatcttcatctcaactggattagtagttcaaatggagaactttcaaagaaccactgttgtagcaggcagcagtactatactaggttaagtagtaatgaatggatattcagactttaacaagttctaaaactaaaagcccattctattatgtatctttacccctttatagagggctttgtgactagtgtccctgaaagtcagctttgattgttttcaaatatggctggtagcttgatttttgaaaactgccgcttagcattcagaagaaagtgtgtgtgtgtgtgtgtgtgtgtgtgtgtgtgtgtgtgtgtgtatgtctgaatgtctgggtaagtagccacttggctgcaatagaacctaagttagctcagtgtttatttttttttgttgtttgttgttgttgttgttttaacacatgtagtatagtgatgatgatgaagtcagtggaatgacacaaggagacagacttcgggccctgaaaagccggagacagccgaaagccagcgctatccccctcacgtgagtgcctccctcccttctgatcacttgtctgttatgtttcctgtatacttttctccatagctgcacaccattactttgtagtgatcacttgtgtggtttaaaatctagaggtgctctgctgggaagtgctaagcacgtacagtctgaggagatgaatgcgtttatctctgtgtcctactgtaacctctagagccatgattggtaagaaaacaatattaaggaagttttgtccgtagacagtccagagagtgacagcagatgtcaagaccaggttaatagatttgtctctaggtattaaaatggttacttgttattccactcccttatacatgtccgtcatcagtctgtacacaggaaaattgagtcagttgtcatgatgttctgtcatctcagagtaatgataaactcatcccctaattatgtttttatttatttatttatttttggtctggagaattgaaatgcagacaaaggtttatcacaagaataaaaagtttcatagttagtaggtgttcttatctccatatgaacttcttaagcacttgtattaatttggatccaactacagggaacatcctcgatcggcattcaactacagggaagcaaagtatgaagctgctgtacgtttctctaggctctctcccataggtgacccccccaggccattgctcctgtcattattggtgtttccctttctctgtgagaagactgatggagataagtctctttaccatagctctctggcagtgcagtaaatgttagggatgtggttcttcagcatgcctcggcgtccagcacgttgtgtgtggggggagggttcctgacacaaagagtcaacattttcaacataaagtcttttgtgaattctgattttaagtgtctattaagaattctcctctttacaaatagtaccttttgtttaatttattttatatgaatagataaaaatatagtgaagaaataagaaaaatatattgaagaaatatcttcaaatgccaagttttaaaattattaatgtttttatctgaggcctttctagttatttttattcacaaaataatcatccccaaactaattctgtgcctgatagaggaaggtaggtcatactccacagcagccatccacagacctagccgagccttggagtcatgtgggagtttaccatatataatgcatcttgtatgagattctgatttccaacaaacctccttgcttgtcccttgctggttgtggtggtggtggggagactttgacatcctttgaattgcaaattttacgggttacacacactttttgttttaagattggccattgccaagttttacttttttttttttttggtttttcgagacagggtttctctgtgtagccctggctgtcctggaactcactctgtagaccaggctggcctcgaactcagaaatccgcctgcctctgcctcccaagggctgggattaaaggcgtgcgccaccatgcccggctaccagtttacttcttagtaggttgttttgccctacattcatgagccaggttaggagtgagaggggagacaaattctttctggtcaaaagttcttgttggggagctggagaaatggttcagtgattaagagcattagttgttcttccagaggtcttaagttcaattcccagcaaccacatggtggctcacaaccatctgtaatggaatctgatgccctactctggtgtttatgaagacaaagcactcatgaacataaaatgcataaattaaaaaaaaatctaccaaactaaagttatttttttaaaaagttcttattggactggataagaggacccaggttcaattgccagcacccacatggcagctcacaaccctctgtaactccacttccaggggatctgtcatgatcacatggatttacatgcagccaaaactccaatgtacataaattaattaaatcattaaaaagcttttgttagctgctgtaaaaatgcccggcagttgaaagtgctgtccatacagaggccccaagtttggcttccaccacctagatcaggtacaatacaatcagctgtagctccagctccaggaaatttctgcgttctctctctctctctctctctctctctctctctctctctctctctctctctctctctctctctccctctctctctctctctctnnnnnnnnnnnnnnnnnnnnnnnnnnnnnnnnnnnnnnnnnnnnnnnnnnnnnnnnnnnnnnnnnnnnnnnnnnnnnnnnnnnnnnnnnnnnnnnnnnnnnnnnnnnnnnnnnnnnnnnnnnnnnnnnnnnnnnnnnnnnnnnnnnnnnnnnnnnnnnnnnnnnnnnnnnnnnnnnnnnnnnnnnnnnnnnnnnnnnnnnnnnnnnnnnnnnnnnnnnnnnnnnnnnnnnnnnnnnnnnnnnnnnnnnnnnnnnnnnnnnnnnnnnnnnnnnnnnnnnnnnnnnnnnnnnnnnnnnnnnnnnnnnnnnnnnnnnnnnnnnnnnnnnnnnnnnnnnnnnnnnnnnnnnnnnnnnnnnnnnnnnnnnnnnnnnnnnnnnnnnnnnnnnnnnnnnnnnnnnnnnnnnnnnnnnnnnnnnnnnnnnnnnnnnnnnnnnnnnnnnnnnnnnnnnnnnnnnnnnnnnnnnnnnnnnnnnnnnnnnnnnnnnnnnnnnnnnnnnnnnnnnnnnnnnnnnnnnnnnnnnnnnnnnnnnnnnnnnnnnnnnnnnnnnnnnnnnnnnnnnnnnnnnnnnnnnnnnnnnnnnnnnnnnnnnnnnnnnnnnnnnnnnnnnnnnnnnnnnnnnnnnnnnnnnnnnnnnnnnnnnnnnnnnnnnnnnnnnnnnnnnnnnnnnnnnnnnnnnnnnnnnnnnnnnnnnnnnnnnnnnnnnnnnnnnnnnnnnnnnnnnnnnnnnnnnnnnnnnnnnnnnnnnnnnnnnnnnnnnnnnnnnnnnnnnnnnnnnnnnnnnnnnnnnnnnnnnnnnnnnnnnnnnnnnnnnnccacccccaatctccccaccgcatccccgtcgataccacacatcctacacctaccccagctgtctcaactacttgaggactaagtatttaaatgcctgaggccatgagtaccatctcagaaacatacaaggccacagtagcgaaattgatggctcttggtcaggtgcacttctgtaatccacattgccaattgtgccgttcactggacctcccaactgactgaggagtgttctgtttttgttcagaggcgttccctggtcgcagtcacccctcccctgatcatattagactgtctgtgggttgtttctgtgtccgtttctacttgtgttcaggtgtagtgttttgcatatctaaggatggccagctggagtactgtcagtcagtatgatgggagatggagtctaaccatttgttcctgtgtgttgaacctgtttaaactaaagtcagcgtttttgtctcaacagaagctggaccaccaccacccttgtttcctgcccctttgccatcacagtcgctgctctgggccttttagggtgtcttaaatccacaggtggctctatgtattttattatatgatttattttggcttcccaatgtgaacatctgttctttcccttccaccctctccagatgtcccctagctgtgctgacctctgcactgtgtagtgttgccatctggtggattgtgtgtgactacattcttcccaccctgctgttctgtcttgatggcttcagaacacagtagccatctggaccctttgacagatagtttgctgtgtaagtttcctgttccgtttctctcctgccctcccccccacccccctgtgtcctgtgtggttcctatggtgtatgtgtttctccttctggctctcctggctttgttggtttgcttgttttccagggctctctttccgaatctcttcaatgaatgggatggtaccagcaggggagggcctcaaggagccttctgagtcaaggatgttaaaaataacacctagttttgaaaagttgtactagctattcataaatgtggacattggaatagttttctcacctgtcaaaaaaccaggtagttgagcctggaatgtgtcttcagtcaagtgtgtctctcaccatttctgcttttagcaaagattgggctttgttgccttagaggctagtgaggatggtggcccaatctcttcaggtcacctgtcttgagtctatagaactgtccattctttcatcacatcttctttgtgttaagtgagaaaaggagaggggtagctggctgtctcccttgcttgtgtttctatagtctctggactcttccttctcttccccaaaataggcagaccatctttgttagattatgtacacaagtgtaatctcctgacatgtcattctctcaagggagacacttgtcagcagaaagcagcagaaaacctctgtgtgtaacatcacagcccaggaacacagagggagacatgtgccacaccaccaccatcctctatctgttttctgagacccttcttcatcatttcattccaaaaatttacttttcttgtaccagcttggacttagagattgccaaagcattcagaattcccttctaggatctcctccaagtgaaaatctgtcacagccaacccttgccctttgaggttctgttgagagtttcatgtagctaagaaagatttaaaaaggaatcagagtccactaaagaaaacttgctgaataaatacttatttacagtggtgtttccttgtatatcttagatgagtttataatctcacatttcactttttttttttgccccctctatctattgaagaacaatgataccttttatagttagttcttcccaaactattctaagtggccaagatgttctgaatgggtaggtggagttgctgctaataatatttgtcttcaggcccagcttaaatgttgctttaaatgttacttctactggcaagctcctcagagtcctctgcgagagcgttagattagtcctgtagcttatgtcaccactacgtttccagaccaaaacagggtgttccgtttagcctgcctactgacttgaattaaaagctttctgtgattgaggtaggtaacagtgtggtcttcatagccactcgctcttggtgagactcttcccaagagnnnnnnnnnnnnnnnnnnnntctttgttagattatgtacacaagtgtaatctcctgacatgtcattctctcaagggagacacttgtcagcagaaagcagcagaaaacctctgtatgtaacatcacagcccaggaacacagagggagacatgtgccacaccaccaccatcctctatctgttttctgagaacccttcttcatcatttcattccaaaaatttacttttcttgtaccagcttggacttagagattgccaaagcattcagaattcccttctaggatctcctccaagtgaaaatctgtcacagccaacccttgccctttgaggttctgttgagagtttcatgtagctaagaaagatttaaaaaggaatcagagtccactaaagaaaacttgctgaggggctggtgagatggctcagtgggtaagagcacccgactgctcttccgaaggtcaggagttcaaatcccagcaaccacatggtggctcacaaccatctgtaatgagatctgactccctcttctggagtgtctgaagacagctacagtgtacttacatataataaatgaataaataaataaaaagaaagagtaagaaaggttttaggataaaaaaaaaaaaaaaaaaaaaagaaaacttgctgaataaatacttatttacagtggtgtttccttgtatatcttagatgagtttataatctcacattttacttttttttttttttgccccctctatctattgaagaacaatgataccttttatagttagttcttcccaaactattctaagtggccaagatgttctgaatgggtaggtggagttgctgctaataatatttgtcttcaggcccagcttaaatgttgctttaaatgttacttctactggcaagctcctcagagtcctctgcgagagcgttagattagtcctgtagcttatgtcaccactacgtttccagaccaaaacagggtgttccgtttagcctgcctactgacttgaattaaaagctttctgtgattgaggtaggtaacagtgtggtcttcatagccactcgctcttggtgagactcttcccaagaggcttaatttgtgggtaacagttcactgctctgtggtgacactggccctgctgtgagctggtaggtgagctttgccttgtagtgagttccatcagctggtggcctcgagcctaagaccagaaagcattttatgttctctatctactgcacacagtgggggacagtgctattagagaatggttcaggggcttgtggggcatcctacagaaagctctgtggcagtgatcctctagaaagccatctatgcattttgaggcttggcaggtcactcctggtccgtaagactgtttttctaactttgctgtgcatctcgtcattgtcagtgtctaaaatctgcagctgctgcggctttagaaataccacagacagggcagcagtctatggtttgggcacagggtcaggaggatgaaggcaaacttggttggggaagagagagagaaaagaaaaatgtatattttgtgtattgataggaagaaccatgtgagcagggcaggtggccctctcgttctgtctgagcagctctggggctttctcactttatttaatggattaagtgtttgctcaggccagataacctaaggcctccccggtgtggttaatacatactaaatttccttctgagttttaaagctccacagaaattagtaaccactaatatcattatttcacatttgtttacaactgtttcttagaaaaataaatcaagcagtagtagatctttgttttgtgtagcatttaagcatttcagtaatttaagagatcaggagtaggtttcctgagcaggcattagggaggagtgtgtgtgtgtgtgtgtgtgtgtgtgtgtgtgtgtgtgtgtgtgtgttttaaaagttaccaagcgtttgccctcagatggtctgagacgggggagtggtgggcgttacagaagaagccactcatttttctcccttgtaaagaagcagcagagggaaatgaagtacacacactgccagaagcctggagaaatcagcaggtggatttggttgccttaaagcaacattctagattcatgtccttatgagataaatatttcccctgtgattgtattaacagaaagaaattgtaacagttggataagagaagtagcattaatactctgtatagcccagtacagggtaaccctgatcaacaactaacagaattttttaaggagagggtcttggaggttcccaacatgaggtatgatgtataaggctatggctgagccagccagtcctcttattgttaacacattatgtccgtataagtgagtccgcatgcccagtaactatgcatcttgataatatgcctactaaagtgtttaattcattttaataagccctgtttggggaaggagagttccttggagcagctcgttcctccttgaggcaccgagtcacatttctgtatgtgcctacagtttctgctgaaatatttcagatgagctttgagagttgagccgattcaccagggctagactgctcttcttgtacagtcggagagccaagcagagagctgtttggcttcctctggaagctttgctgcagtagaggagccggtgttgtcagtcacccgggcacgacagcctgtgaagtagatgcctccttagttggaatcatctctttttactctcttacaggttgctttcccaatcgtaggaaaatttactctgaagggaggaaacttttaagtcagtgttttctccttcattgatgcgaatacatcggtgcacatggctctgaagcaaagagtcaacaatttttgatgttttctgttatttttcttctgacagtttactgagaattacttacagagagtgtgctctgtgtagccgattctttctgattcacgatttttctcctgggcagtcttctgttaagagaaggcttttagattttaattaggacaagtttcacagcatttaagtaattgtagtcttgttatgatacttaaagatttagtaagtagttatgatgcagacaaaattgaaatctcgcttgaacatttaaaactttgcttgccataaaattattactttgttgtttattatactttctttcttcgctgaccagtgaatattatgtagctgttttgctaaatttatatttaaacactttaaaagggtttatgacttgtctttgtgactgtaatttgagaccctgctttgacaggtttgacgaataggtttctttggtttgtaaattgtacagaatgccaggtcattcattttccccaaagcaaagcaccctggctacctctgtaataaccttcaaagagaagtgagatgcttggtataaaaatgtgcttcaagtttgttttgtgtataaatggcaatgttattgtgaaaaattgcctcctctgtcaattatttaacagttgttttagtgaatataatcttaccttttttcaactgttttcagagtaattcttcagtccagtgttcagagctgtaaaacccctgaacctaacctttctggcagtgcaggcattactaaacgaaccaccagatctgcttcggggaaaagcagttttaaaaggtgagaaaagtctctcattctggcaagtctcatgtttgtttccagttcactcttctggaccctgcttctggagactgacatgaagataggaagttggaggctctgtgatgggaatggaggctgctgtgttaactggcttttcagagcaaatacctcttgttggaagtgtggtctctggcatggtttgatatggggaagctgagagaactttgcctaagtgcttgttgctcctcttctcccatatcagatagagcttagtgagtcatggcagagcctctgggctctcaacctgaccacgggttctcctgccgcggtgcttcccgacacctgccactgctctcccctttatctccttggttgttacttctacctactctaggctctgagaatgttctccaccatctctggatgtctgtcataaaccaaagtcagacatgtcattctcaagttattcctagacccagcccctgccaagcaaagaaaagaccacaccattgctccttcctgacctgtgaaaagcagctgccttgatcatgcttgggcaccatcacttgacaggggtgacttcacttgtttttgttttttggtttttggtttttttgagagagggtctcttggtgcagccatgactgtctcatagacctgcttacctctgccttccaaatgctgtgattaaaggcatgcaccactaccatccatcaatacttcactctgaaatcggatggctctgaagaaaaacagggccagattctacattctacttgactcttttatcagttcttgtttgtttgttggacgctttctcaccttcattacgtaggtcattgtaagctcattgatgtggtccaccatcactgtcccaagagctctgggcactctggattctaaggaatgcttttgagttttgttatttttccttgttgctgactttataacatttcactttggagtgagagcctcctgagaacagaaaaaagaacaacctacgtgggtacttgagaaacttcagtcagccgctgactcagaaagttgggatttgatcttaaggattttatgtgtgtggagtgttggttaccacagaagccaggaagcattatttttaattagatatgtacttaggtgtttgtttcttttatactgtagttccaacttgacaagaaaagtaggaatgggtcagatttaggtacactatataacatagtatctgagttctgacagaaaaataggagatgggccgagttgtgcccatttaatttcattaattaatgatgaatcaggaaccatttatttactgattgacagtgctgatgctggaactcagggtttcatgtggacaagacaagtgctttactactgaagtaaataccaacccgagttatgtcttaaaagataatttaatgactcggataaatgcttctgaaacaagtaagataaataaataaaattcctatgtaaaacttctgagctaaaactccagtttgaaagtatacactatggccgggtgtggtggcgcacgcctgtaatcccagcactcgggaggcagaggcaggtggattaatgagttcgaggccagcctggtctacaaagtgagttccaggacagccagggctatacagagaaaccctgtctcaaaaaaaaaaaagagagagaaattatacactatgacatatagagaaaagtgtatcgtcataattatttcaatatgcaaatttctaattatgcatacaaatgaagcacaaaacccccatgcttcttgattcttcttggtgtgactgttgaggctttagattccaacttttccattaagttaataggaaatgcaaataccttttatgtgcagtcagactgtcaaaagttccctgtgaatggtggcctttaattccagcccctaggagacagacagggagcctggtctacatagcaaggtctaggtcaagtagggctatgtagtgagaccttgtctcaaaccagaacattagctgtgtcagaaagtgtggtgtcagtgttgatatctaagtgttcgagcttttggtataatcaatccagtaagtcttgctcatttgattctgagtgatagaatttagcccaagctttgaacgacaccatgcctattccaccgaggaaggttgactatgcactactgatccttatgtctaggtttcttggctgtgcatggctctcctgtgacctccacttagcctccctggatagtggtttctgattttcagtgagctcctcctgaggtcctagattggatgctttgaggattctaaataagctgggttaaatgaactggaccaaagtgcctttccggaatttggggtagagataagccaaagagatttggaagttgaggtaggagtactgtggcctatattcatagtactttattatcacttctagcctacaaaagaaaggcgcacgactgtgcacggcattccaccacttctaggaaataaggagaatcagagatttccaggatatagcctgcatttaacctgctgaataatgttcagcttctgtttacagggtattaaaggaatgccctctatataccattaacattggtatataatctactccaggaaaaatatctcagctgagatgattgggtaattctaacatacttagttgaagtctcttctctttaaacaatagccccccctccccccaaaaaaagcacatcaaaacaaaatttacaatttctttcaatgtctgtctcccttcaggctcaccaggcctcctggttcttttgtgggaaagtccctctctgttccaggtccttgcactcacacatctcctgcgatggcaacattaatgtttaatccccccccccacacacacacacagaggcttctaggatgcagattctcgccaacctccctttgcactgagtggactcctgagttttgacattgtatcaagagagacttcaactttcagagactttcccagcaaaacctcttaaaagattggctacttgcgctgagaaaatgggtggattatgatagaggagatgggcggatttgctgttggaggagaaaaaccactgtgctcctcctatgagatggccttcttgtcttatgtcatttggatggaagccacatgcattcagaagtcctggggcttctgtgtcggagcacacagcttgtgtgggatggagtcgtttggttggtgctgtgtttctcattttcatttgtcaggctctgaaggaagttcgtgggtttctacacctctcactttctactaggaccataaatctattataacagctcataactgacataatgaattggcttttttccagcattcccatactaactctgaagcgctctctcagagcaagccttgaacactgtcacaccggtagagggcttgccggtgccttgtgtgggccattcaccccagttcacaactctttctgtagctctttactcctgtgtttctggaagcttgtaaagtttcttttgggccatcttttctttttccattatttcatcccatttcctgaaaaatctctcttgtcccaatgaccttctttatatttaagatgcatcactctgcttctgccacgataatgcctgtggctccgggaaacttgtacttacaggtgtgatgctcaaggcccttcattgctccaaactcatgccttgcgaccatctccgtggagtgcctgcctgtacttcctgggctttctctaagtccttgctgtggaattcatttccgtcttgcctgtcattgcatcatagctctctgggcctcagctcctggtttctgttccgttgcttccgggatttcatatttcatcggccattatctccaggaaccccaggatgttctccctctattcttcttaagctaacatcctgtggaatggcagatacatttccacttgactcgacccagagattgtctttgcactcaagactctctgttccagtgtgtaaaaactatgcacccagttcgggtcagtcttctctttccaagtgagggtcgtctccggatcagaagtaatttcataggtgggtttgtcttttctcatttgtactttcttcttttcctttttctctgaaagttgctaatgagtttgaggtataacagcacattgtgggagaaagaaagagaggaagggtgagttaggttgattttgggtgagcccagaggggcccttggctgtccctgcccagatctctttacagacaggccaagtgctccaagaggttgggcctggctcgaaaccacccagtaattcctctttatctcttccttctctcctctttccccacagcctggctccgtggagggagcggaggagaaggagcgctttgcagcaaatgcccatgctggccttatggtacctgccttgctctgctgcccatgcctgcctgtctttgtttatttctattgcttttttttccccctcctttaaacaaaatttgaacttttctctgccctgcctttctctcctgtctgcctttttatggttgatgttgtattgtctcttctaaaggatgccattaaaaatcacacctagtgtgtgcttttagcatgccgatgttctccttgtgttgccctccttgtctttgaaattttcctaaggaatactttagagtcttcatggtaaatctctctctctctctttttttttttctcctcagtccagccatttcaaggactaagacagtcttgcgttaaagtaaaaaaacggtgaccagcactccagggaagactaggaacagaaaacccaaaaaggatttagccaatcaatctgagaacaaagcagactctgcaatggccttagcttcttaccacataagaagttcattcaatgaagaaaatgtcactggcctctcatccactcactgactctggggtgtggttgaaccatttgagggcctgactctcccttttgttatctcaagttggacaaaagctgctgttgtgaacttagtctcaggtgtcaatatcctgtcctctgccaccagagagttgtctggtgagtgtggtacatgtgtgtgtgtccctgtgatggcaatcatgtttgctgctggcctccagaagagttgaggatctgatggagatatcttaggtatttattttttgttcaaccttgtgaccctgactcgcagtttataaagatgaaagagatgaacatcccaccagtggtaccctccatcttcaggtatgatttggtacaatcagcttcactttcctcttgttaatcctgttgtgatgttcactgtgtgaagtacccaagctgcttgtttttcaccaaagagtgctttattaacaacctgtgaacactgcatttaaacactgttgtgtgttgttgtggttactgaaaacctgctaggaaatgttgagaatgttggaaccctttctcagttacctggttcctacaaatccttccttgtgtcatttaggatgaagatttcagagctgggatgttgttgggttgctcagtcacgttataattgtgtttacttcattacatcaaaaccaaacatcaaccctagcattttcctttgggaaagcatcctaaataatggtggctttaacaacaaaattgtgagccttgctgtattggcgcacgccttgaatcccagcattgggaggcagaggcaggtggatctccaggtggagttccaggccagccaatgatacacaaggaaatcctgtctcaaaaataaaacaaagcaaaacaaaaaaaccaaacccaaaatcccaaaattgttaaccctttgtagagtctttctctgtaacgctgtggagttttttccttgtgatccacagtttgattttagtgacaatcacttgcttctggagttaggctgtttgtgtaagagatctcactgttgcctttggttagggaatatgactagaaactgtagtgtgccttttctcttcaccctgctggaagccagcagcacccgtgccatgaagcaattgcaaaaccagaatttatctgctgccacaaaaaaaaaaaaaaaaaaagacagagcccataattagaaaatactctatagttgtcttggttacttccacaattgaggctaatggttttttgactctcccagtttagaaactggagaaatgcaatattgaaagccattgacagccaatgccttcccaagacaggtgaatgtgtcaggtgagcaggcaatcccacttgaaaagctgccttccttgtagttgatattgacaggttaaagtctagttaatgtaaaaatattgaaagacaataggtcccccctttcagtgtttctatcctcaaactgcattggttggccttggattggaggcatgaggattcaatgtaaatccacacaaagagcccccctacctaggcagcacgtagctttcaaacaacgggaaaaaacagttaaggtaaagtttgttatctctggataagaattggatctaggtaggagggcaaacgtttcatttaccaatcatgctcaatcaaactgcctaagtctaaaatagaaccttcctgggtggttcttccttccctgaacaagctaggccaggcaccaggagacagaaggagactccattccatctgaactaagctagatttgttcgcatggatcagaatgagttggtcagggcctgcccacactggctcgtggtctgcaagtttgggaggaaaccacctgggcttcagagatgaccacagtgctttttaaaaggcacttttttgtgtttgcagctccattcatctagaagtgctgccactgtggctcttccctgcatttaactcccttgctaaagttacttaggaaacgtgagttggtgaggacacattcatttctaggaaaagctacttgatgttgtctgggcaggactgcttagcaactgaccaccagtgacatcaggacccaggaagtctttgatcagactaatggaaagtccttcctgttgggaattagtggacaacctctccccaaactacaactacccagaaacttctgggatagaagaccctgtagctataaagcatgactcagtagatatgggatggaggggcccctttaacttaagaactttaaatgcctttgtaagtgcatcaaagcttcttccagcagaatgaaaattagaaaagtatatttataggtgcccttgacgcttttggggaacgcatactatccagagtctaagagaagaatgtctgcattagctgagctgagggcttatagacagattgtcttagggtttctattcctgcacaaacatcatgaccaagaagcaaattggggaggaaagggtttattcggcttgcgcttccatgctgctgttcatcaccaaaggaagtcaggactggaactcaaacaggtcagggagcaggagctgatgcagaggccatggtgggatgttccttactggcttgctcagcttgctcttttatagaacccaagactaccagcccagggatggttccacctacaaggagcctttcatccttgatcactaattgagaaaatgccttacagttagatctcatggaggcattttcttaactgaagctcctttctctgtgataactccaggtgagtcaagttgaaacaaaactaggcagtacacagattaatacaattctgaggcccagctataactcttgatttgaggcaagaaggacggaccctgagtagtgccacaatcaagggtagcagtatttgtcgaaactaacatggccacatgctgctcttcctcattaactccccagctttaattggtccccaaaacctagctctatccattgccctgccctgccctactgcccccctgtcgggtggcttctacctcttggcttgggccctgacaggtcacaggggcttccaagcgttctcctgaggctctttgagcacaatcaggtctgtcgacctttccagctttctgggtctggaattcctcaggcctttgttagcttgaatagctgtctgtgacaagtgagtatgtgttctagaaacatcagctgtttttcctcacatattttttttaaaagttcttacttgcattttggaaagcagttggtcagaaaccttaaaacctattttttttttttttaagctgggcaattgtagcaggcagatctcttgtgagttcaagacctacctggtcttcaaagtgagttccagtatagttagagctacacagagaatccctgtctcaaacaaaacaaagcaaaacaaacaaacaaacaaacaaaacagataatacaaactatattttaagatttctctcccactgaagtgacctcttgagaatagccactgttcttgcatttcttcataaatctgagtgttccccatctcactgagtggaaatactacagatacatttaaaagatcgcctatactgtgtaagaaattacctcctgatgatccagtagaactcactgtggatagacacgtctgtcagattacggtactgcagttttacatccattgtttgaagactttattgtacactcatgtgcagatgaagttttaaaatgttactgacgagtcaccatttgatcagtcattgtcttgatattttattaaattgtatatttctaataatattttttaaagttgagagaactggttggatgtttattctcctgaaggtatttttaagataaagcttcaccatagcctgtaaacttggcacataagtagtttttgatactttttgttgcatttgaaaaatcttgtgtattgtaaaatggttttatacaaaatactaaatagtagaaattgtataatttacaatcgtataattaaaaatattaaacagtcttttggtttgttgtattcacttactgagcatgcctaatagatagcaatttaattatgaaatggatctaattcttagtttacagaaggcatcatgacaaagtactacagactgggtgggacaagtaaagaaaaatgtgttccttcttggtgccagaagcatgaggctctgaccaagatgtcatcaggatgggtttttcctgagaggttctgttctttgcttactcatggacacttctcactggacttcatatgccctttttcctctgtactgcccatccctggtcttggaagcttagcagtgagcatggattaggaccaccctcctggcctcatttacatttgcctctttaaaggtcctgtctccagatgtaggcaactgtatggtacagagggattaaggcttccggaactcaatttcaaagtgtccaggaggggagggagtgacttcctgctgtgagatcactccatgtgcacctctgtgccagcttgaataacctggagatttgatggttaagacttaggaatcctgtaggccattgatcatgatttgtagcttggcctgaggaagccctcaggctccctgggtgatctgctttataaagattgattttagtcctctgtttatgatatttttggtatgtagtctcatacacctgagtgtgataacccacattgtctttacccgaaggtgagaacatgtttgatgcaggtaagtcttggcttgtacagaggtcttgcctaagggattatgagtggaaagataggcaaaaaatgctaccaagatggcgcagcagataaacgcatttccacaacaggcctggtgacttaagttctatcctagacccacataaaggtagaaggaaagaactgactctgcaaaccatcctcggctctcaacaggatgtacacaccccaatcccaacacacacaccagccccccacaggatgtacatgccccatcccaacacacacacacacacaccagccccccacaggatgtacatgccccatcccaacacacacacacacaccagccccccacaggatgtacatgccccaatccctacacacacacacacacacacacacacacaccagccccccacaggatgtacacgccccaatcccaacacacacacacacaccagccccccacaggatgtacatgccccaatcccaacacacacacacaccagccccccacacgatgtacatgccccatcccaacacacacacacaccagccccccacaggaagtacatgccccatcccaacacacacataaaacatctcttaaaaagcaaagccaggagccaggcgtggtggcgcacgcctttaatcccagcacttgagaggcagtgtcaggtggatttctgagttcgaggccagcctggtctacaaagtgagttccaggacagccagggctatgcagagaaaccctgtcttgaaaaaacaaacaaacaaacgcaaagccagttttcaagcctgtgttatatcctgcataaaggagcagtttgctagaatcatctggagcccagactgttttgtacaaaacttagctctggccatttacttcttgattaggcttagtcagcctacatagttctgtttccactcatgagatgaggatagtaagattccagctgggataggatgtgagtgatgtgcgaaaatgccaggagccactcagtgcaagagcttggcatgtactaatatatctgtattatgttcaatgaaaaaatgaaaatattgctataatgcttttcaaatagatggtgacagctcccattagcagctcttgggacatgcatgtgctagttagtaaaataacaggacattgacccctaatactgaggtcatggggtctcttccttttttccattatccagtgttttttgttcttggtggttggcacagtatgacctcatctctatcatatttggtggggcagttggggggaggggtggacctttctgggcaacctgtacagtgtccttcccagctccctttctgagggtactggttgtgtgttggtgtgtaagtccttacgtgctgccctgtaccacaactgctgccttgtcttgtttctaactaagtctcgtctttttgccagcaagtctgcgtggctttgacgagcttctggatgaacaatgttctgtccaaacggaaatggccaggtaaaggagcccttggcttggagggccagatctaccagatctcatagagagctaccagtgatcgccggggcctcacagagcagcatggtttctgaacagaggctctgggtgggaagagaaagcggaggaggaggtggtgcaggttgggtgggtgggtggtgcttgtggaacaaatctcaggtcaattcttccttatgtaggaacagtgcctagagaatgcagggtgtctagcacagctccacccacacctattcagagcctcaggctcccagccattggacagtcccattcccttttccccccagcttctgctacttcagggggtccagctgccctccacccccagaatggctaagtggatatagaacttttgttagaagcatcaaagcagtggcccaagtactctagggatcccactgagatagcgattccttgcccttagatcagtgggaagaaaaaggacctcacttaagagagagtggagaagcagagagagcttctaagggcggagcttccaggatggacctcaggttgtctagccagctgccttcatgcctgacgctagatgtcttcgcagtaacctgtgcctgttgtcccccagcccctgggaatggaggaggtctgctgagggtccagcgggaaaacataggaaacaccttaggcctggggttggcaagtcctctggcattgtggattggcaggacaggatgggaaggagccagtggcagttctgcaaaggtctcaccggacgtgccttgccttgagcacaatggctggccgtggactggggatgagaacagatttgagaacagcttaaccatctcctccttttccagtgatggctggctgtctcgggctgtaacctttctagaccggctattgatgtggcttggggtccgcagggcctagccctccagccctctcgaggtcccttctgactacggacggtgctgctctccccactgcgattccttgtcctgtgcaatgtaagcctgattttttaggctggtgcctcagccacccagcaaatgtgtctgtctcattcttccattatttcccttgggtgccacatcacctctgttgatggttgagaggggggccaactccaagcctggtgagtacctcctgggggcaaaagaccatcagttaacttcagcagtgtgataggttctacaggtgcacagtaggcctgggaggtaccatggggtaacaacacctacttgcctggtatcccaaggcattatagagatgcttggtgaacatccccagcagtgttttcacatctttcacggttcacttccctcacagggtgcctggtattcttatttcttccctttctccccttccaaaaaggtctctgtgtacctattcattatcaactgcattcccaagcatttgcaacttggttttgtaccatgaggccacccagctaatgtgtcagtgtgtcactggtacagttctttgtgcctttagtacttgacaactctcaggaatgccctgagtctgtacgggctgatgcctctctattctcctctaacttacaaatgcttctgtgtttccagttttagtaaccaccaggaactgggtgttctcggaaagaatactttgtcactctttctgggttataagcacctctgtgctttgattgttaccaagtcactagaagcttgacccccttgtctaccccagtaccttgtggtagctaaaacaaaagcatgccacccatattccacggattcctgtgtcccttgattaataaggctcagggtcaggcctttgtctgcctggtcatcttctcatctctggttacctttctgtgggtgaccaggcatctgcagggcagatgtcctccttcaagaagacacccacatttcagccgcagataggtgggccattcattttagtttttttgagacagggtttctctgtgtagccctggctgtcctggaactcactttgtagaccaggctggcctggaactcagaaatccgcctgcctctgcctcccgagtgctgggaggtacccggctttaggtgggccattcttcagactgcaaagaagcccaggtacccaagagagggtataagtggggcatggtgggagcagccatgcctgtggaatcttgagttgtactgtttgagtaatcgttctggtgggtgaggatgtggtgctttacagagaggggagggggcagctgtcatagcccctgagggaaagtgtcatggtgtgggcttctgaaatcaggagttctgcacttcgtgtatttaaggaaggtttcaggtggacctatttttttcttaatccattccctaactctataaacaggttaggacagtcccaagccaagatttttttgttgttgttttttgttttttaagatttaaaatttatgtatatgagtacactttagctatacagatggttttgagctttcatgtggttgttgaaaattgaatttttaggacctctgctccctctagttagtcccgctcactccggtcaactcctcttgctctggcccaaagttttgttattatacataagtacacagtagctgtcttcagacatgccagaagggggtatcagatcttattaccgatggttgtgagccgccatgtggttgctgggatttgaacttgggacctttggaagagcaatctgctcttactgagccatcttgccagccccacaagccaagttttcaatgcttgtggtccactcaggattgtctcctggctaccagagtgtccttgggacacagtgggagatcggaccctcgaaggttgatcctcacaggaagctagctggttgggaggtagcaggagcaagagaaacatgggcagaccttcctctcctcacagtactgcatgttaagtctgcagtggacagcacttgttcaccagagggtatggctgctccaaccttgctcacaccctaggagaatgttagctgtagctactttacagagcagcctggccaagtgcccagaccctctgctgaagcccttgtagcaaacttctctagcagcagcttctgggtcaccagtaccttaagtcatcatcaccctgagacaggaaacatctgtgccagccatactagacatgttgacatggctcatgatcatgccccagctgggcaagtggaattcctttgccaggccatgtgtgacagcccatgagccctcaactcagatgtcagaaaccctctggttcagatgtgacacctctgcctgacctccaaattctaagactaggtttctttggtgtggctgatcggaagcacaggctgagagtccacctcatgacaagtctgggtgtctggaagggaaatctgagcttaggtcctgttttgggtgtacatccatgcagaatgagtttgctaataatgactttctctgcctctgtgacttctgtcttctccagaacactctggccatggcccatgttacaagcaaaaattataaccatttccctcattaaatcatcaaggtggcccctgggcaaaagcctgttggaagggcatttgctgtgtgatggtatgagtcaaggttgcattgcttcaagctttcccagtgtcattcacacactcaaagggcaatgaatgttcttaagagaaagcttgcttctacgaccttcatggagcagccctcactgccccagtgactgtcatgtctaaagtcgatgcaggcttcttcggtcagatcatagtactcacgagcagtgtgccagccccagagaaaatgaataaggcagtcataactttgtactcattcatttaataaacatggggtcagaagcaggtggtcacccaaagcaacatcctcaatagttatgtctagagagcttcaactttgatgactcaaccaaaccccaagagttcagagggaatacaatatcaaccttcatttatacctgggttccagttcagcaccatctcagactttgtggccaaggggggtagcacaggtctggggagcagggttccattgcaagcacaacaggcaaacctcccttcctaacctctacagctgtccaacaccttggctcgtccctcccacatacaatgaatcttccctagttttgccggtgggtgggtggccggccctaggtctcaagctgtttggggtgattgagcctctgaggtggtccctaaccttaaacctccaccagaggccttaagaacaacaccggaactggggcccagccggggggagggcccagcccatgttcgcagtcaggagatgtgactgagttacaagtcagtctgctcagagtccacagtgctgaattccaacactagtgttgaggggggtggggaggaaatacaggaaaccttttcatttgattatattcaacaaccacctgaaccctaagtctgctcacacatactgaggatgtgtgcacgcacagaccacgaggtagtttaaatcactactgaaaaccagtacacttcctctgcttcagagtggttgtccctagtgcacaatgtctaaaccacaactcagggattttctcagaattgagcagtagcaggtgaatggtatgaaaattaggggtgggactgctctacatgagcggttctccacgtgtcctgaaatactcaaggacttttctcgtcttgtttttcaagactcactctgtaggctggccttgaatctgtaggatctgcctgccactgcctcccaagtgctaggtttaaaggcgtgcacaaccacgcccagcagttctattttctaatttactttgctctgtacttctgtgctgggattgttagaatctatgtacacattttaaacattatcccttacaaaagtctctatctggggaaagggcctgacctcatgggaactccacagagcaaaaaagtgcaatgacttcacacgacacgggaaaagcaacatctattgttcttagagtctgactcttctcgcggcaaggaaagtctcttcatagtgctgctctgctgcaggggagtggctgttaggccagggcggggaagtcctcagggtcatccgg

SEQ ID NO: 1659 - DNA, 2434 bp, Mus musculus
atgaagcgtaagagcgagcggcgctcggcttgggccaccgcgcccccctgctcacgccgcagctcgtcctcctctcccggcgtgaagaagagccgcagctccacgccgcaggagctgcaccgcctggagcagcaggacgacctgtacctggacatcacggatcgcctttgttttgccattctctacagcagaccaaagagtgcaacaaacgaacattatttcagcatagataacgagctagagtatgagaacttctatgcggattttggaccactcaatctggccatggtttacagatattgttgcaagataaataagaagctcaagtccattacaatgctgaggaagaaaattatccattttactggcactgatcagagaaagcaagcgaatgccgccttccttatcgggtgttatatggttatatatttggggaggacaccagaagacgcgtatagaacattaatcttcggagatacagcctatattcctttcagagatgctgcctatggaagctgcagtttctatattacacttctcgactgttttcacgcagtaaagaaggcaatgcagtatggcttctttaatttcaactcatttaaccttgacgaatatgaacactatgaaaaagcagaaaatggagatttcaactggataataccagagcgatttcttgccttctgtgggccccattcaagatccaggctggaaagtggttaccaccaacattctccggagacttatattccatattttaagaatcacaatgtaactaccattattcgtctgaataaaaggatgtatgatgctaagcgctttacggatgctggattcgatcaccatgatcttttctttccggatggcagcacccctgctgagtcaattgtccaagaatttctggatatttgtgaaaatgtcaagggtgccattgctgtgcattgcaaagctggccttggtcgaacaggcactctgataggctgctacctcatgaagcattacaggatgacagcagctgagagcattgcctggctcagaatctgtagacccggctcagtaattgggccccagcaacagtttctggtcatgaaacaatcaagcctctggctagaaggcgactatttccgtcaaaagttaagagggcaggagaatggccccctcagagaagccttctccaaacacctttcggatgctgatgacctgtccttaaatgggcttgagaatcaagacaatcaagagcctgagccgtatagtgatgatgatgaagtcagtggaatgacacaaggagacagacttcgggccctgaaaagccggagacagccgaaagccagcgctatccccctcacagtaattcttcagtccagtgttcagagctgtaaaacccctgaacctaacctttctggcagtgcaggcattactaaacgaaccaccagatctgcttcggggaaaagcagttttaaaagtccagccatttcaaggactaagacagtcttgcgttaaagtaaaaaaacggtgaccagcactccagggaagactaggaacagaaaacccaaaaaggatttagccaatcaatctgagaacaaagcagactctgcaatggccttagcttcttaccacataagaagttcattcaatgaagaaaatgtcactggcctctcatccactcactgactctggggtgtggttgaaccatttgagggcctgactctcccttttgttatctcaagttggacaaaagctgctgttgtgaacttagtctcaggtgtcaatatcctgtcctctgccaccagagagttgtctggtgagtgtggtacatgtgtgtgtgtccctgtgatggcaatcatgtttgctgctggcctccagaagagttgaggatctgatggagatatcttaggtatttattttttgttcaaccttgtgaccctgactcgcagtttataaagatgaaagagatgaacatcccaccagtggtaccctccatcttcaggtatgatttggtacaatcagcttcactttcctcttgttaatcctgttgtgatgttcactgtgtgaagtacccaagctgcttgtttttcaccaaagagtgctttattaacaacctgtgaacactgcatttaaacactgttgtgtgttgttgtggttactgaaaacctgctaggaaatgttgagaatgttggaaccctttctcagttacctggttcctacaaatccttccttgtgtcatttaggatgaagatttcagagctgggatgttgttgggttgctcagtcacgttataattgtgtttacttcattacatcaaaaccaaacatcaaccctagcattttcctttgggaaagcatcctaaataatggtggctttaacaacaaaattgtgagccttgctgtattggcgcacgccttgaatcccagcattgggaggcagaggcaggtggatc

SEQ ID NO: 1660 - protein, 494 aa, Mus musculus
MKRKSRSAWATAPPCSRRSSSSSPGVKKSRSSTPQELHRLEQQDDLYLDITDRLCFAIKRPKSATNEHYFSIDNELEYENFYADFGPLNLAMVYRYCCKINKKLKSITMLRKKIIHFTGTDQRKQANAAFLIGCYMVIYLGRTPEDAYRTLIFGDTAYIPFRDAAYGSCSFYITLLDCFHAVKKAMQYGFFNFNSFNLDEYEHYEKAENGDFNWIIPERFLAFCGPHSRSRLESGYHQHSPETYIPYFKNHNVTTIIRLNKRMYDAKRFTDAGFDHHDLFFPDGSTPAESIVQEFLDICENVKGAIAVHCKAGLGRTGTLIGCYLMKHYRMTAAESIAWLRICRPGSVIGPQQQFLVMKQSSLWLEGDYFRQKLRGQENGPLREAFSKHLSDADDLSLNGLENQDNQEPEPYSDDDEVSGMTQGDRLRALKSRRQPKASAIPLTVILQSSVQSCKTPEPNLSGSAGITKRTTRSASGKSSFKSPAISRTKTVLR

SEQ ID NO: 1661 - DNA, 2881 bp, Mus musculus
ccatggtcgcggtcccctgacgggccgcgaccgcctccatgaagcgtaagagcgagcggcgctcggcttgggccaccgcgcccccctgctcacgccgcagctcgtcctcctctcccggcgtgaagaagagccgcagctccacgccgcaggagctgcaccgcctggagcagcaggacgacctgtacctggacatcacggatcgcctttgttttgccattctctacagcagaccaaagagtgcaacaaacgaacattatttcagcatagataacgagctagagtatgagaacttctatgcggattttggaccactcaatctggccatggtttacagatattgttgcaagataaataagaagctcaagtccattacaatgctgaggaagaaaattatccattttactggcactgatcagagaaagcaagcgaatgccgccttccttatcgggtgttatatggttatatatttggggaggacaccagaagacgcgtatagaacattaatcttcggagatacagcctatattcctttcagagatgctgcctatggaagctgcagtttctatattacacttctcgactgttttcacgcagtaaagaaggcaatgcagtatggcttctttaatttcaactcatttaaccttgacgaatatgaacactatgaaaaagcagaaaatggagatttcaactggataataccagagcgatttcttgccttctgtgggccccattcaagatccaggctggaaagtggttaccaccaacattctccggagacttatattccatattttaagaatcacaatgtaactaccattattcgtctgaataaaaggatgtatgatgctaagcgctttacggatgctggattcgatcaccatgatcttttctttccggatggcagcacccctgctgagtcaattgtccaagaatttctggatatttgtgaaaatgtcaagggtgccattgctgtgcattgcaaagctggccttggtcgaacaggcactctgataggctgctacctcatgaagcattacaggatgacagcagctgagagcattgcctggctcagaatctgtagacccggctcagtaattgggccccagcaacagtttctggtcatgaaacaatcaagcctctggctagaaggcgactatttccgtcaaaagttaagagggcaggagaatggccccctcagagaagccttctccaaacacctttcggatgctgatgacctgtccttaaatgggcttgagaatcaagacaatcaagagcctgagccgtatagtgatgatgatgaagtcagtggaatgacacaaggagacagacttcgggccctgaaaagccggagacagccgaaagccagcgctatccccctcacagtaattcttcagtccagtgttcagagctgtaaaacccctgaacctaacctttctggcagtgcaggcattactaaacgaaccaccagatctgcttcggggaaaagcagttttaaaagcctggctccgtggagggagcggaggagaaggagcgctttgcagcaaatgcccatgctggccttatgtccagccatttcaaggactaagacagtcttgcgttaaagtaaaaaaacggtgaccagcactccagggaagactaggaacagaaaacccaaaaaggatttagccaatcaatctgagaacaaagcagactctgcaatggccttagcttcttaccacataagaagttcattcaatgaagaaaatgtcactggcctctcatccactcactgactctggggtgtggttgaaccatttgagggcctgactctcccttttgttatctcaagttggacaaaagctgctgttgtgaacttagtctcaggtgtcaatatcctgtcctctgccaccagagagttgtctggtgagtgtggtacatgtgtgtgtgtccctgtgatggcaatcatgtttgctgctggcctccagaagagttgaggatctgatggagatatcttaggtatttattttttgttcaaccttgtgaccctgactcgcagtttataaagatgaaagagatgaacatcccaccagtggtaccctccatcttcaggtatgatttggtacaatcagcttcactttcctcttgttaatcctgttgtgatgttcactgtgtgaagtacccaagctgcttgtttttcaccaaagagtgctttattaacaacctgtgaacactgcatttaaacactgttgtgtgttgttgtggttactgaaaacctgctaggaaatgttgagaatgttggaaccctttctcagttacctggttcctacaaatccttccttgtgtcatttaggatgaagatttcagagctgggatgttgttgggttgctcagtcacgttataattgtgtttacttcattacatcaaaaccaaacatcaaccctagcattttcctttgggaaagcatcctaaataatggtggctttaacaacaaaattgtgagccttgctgtattggcgcacgccttgaatcccagcattgggaggcagaggcaggtggatctccaggtggagttccaggccagccaatgatacacaaggaaatcctgtctcaaaaataaaacaaagcaaaacaaaaaaaccaaacccaaaatcccaaaattgttaaccctttgtagagtctttctctgtaacgctgtggagttttttccttgtgatccacagtttgattttagtgacaatcacttgcttctggagttaggctgtttgtgtaagagatctcactgttgcctttggttagggaatatgactagaaactgtagtgtgccttttctcttcaccctgctggaagccagcagcacccgtgccatgaagcaattgcaaaaccagaatttatctgctgccac

SEQ ID NO: 1662 - protein, 516 aa, Mus musculus
MKRKSRSAWATAPPCSRRSSSSSPGVKKSRSSTPQELHRLEQQDDLYLDITDRLCFAIKRPKSATNEHYFSIDNELEYENFYADFGPLNLAMVYRYCCKINKKLKSITMLRKKIIHFTGTDQRKQANAAFLIGCYMVIYLGRTPEDAYRTLIFGDTAYIPFRDAAYGSCSFYITLLDCFHAVKKAMQYGFFNFNSFNLDEYEHYEKAENGDFNWIIPERFLAFCGPHSRSRLESGYHQHSPETYIPYFKNHNVTTIIRLNKRMYDAKRFTDAGFDHHDLFFPDGSTPAESIVQEFLDICENVKGAIAVHCKAGLGRTGTLIGCYLMKHYRMTAAESIAWLRICRPGSVIGPQQQFLVMKQSSLWLEGDYFRQKLRGQENGPLREAFSKHLSDADDLSLNGLENQDNQEPEPYSDDDEVSGMTQGDRLRALKSRRQPKASAIPLTVILQSSVQSCKTPEPNLSGSAGITKRTTRSASGKSSFKSLAPWRERRRRSALQQMPMLALCPAISRTKTVLR

SEQ ID NO: 1663 - DNA, 150944 bp, Homo sapiens
aacaaattgcctttctttaagtattgttaaatattcatttgcttctatttctagaagctgactgcctatataaggggccatttcagccttcttcattttttttattttatatagcccctaactttggataaaataattcactgctcatttgaatctgcatttaaaaatggaaagaggaacttaatagagaatccaacctaatctgcccaaatgtatgctctggtatcactgaagagaaaaaaaaaatcatgaatagagaaaaacttcccaccatatgagaatgcaaaactatagatctgtgcattttggtcattcctgatctcctttttcctaaggagaactctggttgagtgggaacccagtgcgctaggatttcatcacattcggaagaatttgtaacaaaaagaaaaatcacccgatattttagaattggttgctggttctcttccaaaaccagaaaagtcattgcaagaagttttctttccagccacaacaggagataaaaaataaattgccttcacccttccacaactacagaagtgacttgaaattgatgcctttaattcacttctaattgtgtggataaggggagagtcagacaaggatgtctttcttgtcctgcaatgattggaaagaaaaccgtgtagaggataaaggaggctgttagctacctcggattacctgatgatctccattgattatgactgtgaagcaggctctctgctgtctttcccattcccctgagggaggagacctggggggtgagcctggcagcgggggccaaaggcagggacaacttggatttgtagcaaatgttgcagagcccaagagagaacagccaagttctgtctgaagaagaggaccgagactccagccagcagagcctgtccaacttggtcagagtaagcaagccagaggtgtttccggagccgaggtctggtgccaaacaggtgtcagagacttgacagcggcgaaagagatggagagatgtaagagagagggagagatgccagagagatggagagcggcaagagagatggagagcggtgagagagatggagagatgcgagacagtcggagagacatgagagagatggagagatgtgagagagatggagagcagtgagagagatggagagcagtgagagcaacaagaagagaggatgcagcaagagatagtcaggagagagggctgaccaggaaaccatccttagctttgcaaggatggcttttttttttaaaagtcctgttgctcctatatcttctttttggacggtggttatacaggtgtatatatttttaaaactcattgaactaacactgaagatctttgcttttgcatgttaattatacctcctttttttttttttttgagacggagtctcgctctgttgcctaggctggagtgcagtggtgtgatctcagctcactgcaatctccacctcccgggttcaagcgattctcctgcctcagcctcccaagtagatggaattacaggcgcagaccaccacgcccggttaattttttgtatctttagtagagacgaggtttcatcatattggccaggctggtcttgatctcctgacctcgtgatccgcccgcctcgacctcccaaagtgttgggattacaggtgtgagccactgtgcctagccaaatttttgtaattttagtagacgggttttcaccatgttggccaggaactcctggcctcacgtgatccacagcctctgcctcccaaagtgctgggattacaggcatgagcctccgcacccagactgttatacctctttatggtttttttttttttttttttttgagaccgagtctcgctctgttgcccaggctggagtgcagtggcccgatctcagctcactgcaacctccgcctcccaggttcaagcaattctcctgcctcaccctcccgtgtagctgggactacaggtgccggccaccacgcatggctaatttttgtatttttagtagagatggagtttcaccatgttggtcaggctggtctcgaacgcccaacctcaggtgatccgcctgcctcagcctcccaaagtgctgggattacaggcatgagccacagcgcttggcttgctgggattacaggcgtgagccaccacgcccagcttctgtttatctatcacaagtcccctcacccacttggacaaatttttttccatgacatttacttgttaaagagacagtttatagaaaatcccacattcaagatttgtcagattgtttccttatgagtcatttaacatgttcttccaccccctatatttcctgtaaaccgaagttagatctcaaggcttgattcaattcaggataaacattttggatagaacactactttataggtaatccagggtatatcatgttgccttgcatcaggaagcatcatacctctctctcttttttttttcttttagactgagtctcgctctgttccccaggctggagtgcagtagtgcaatctcagctcactacaacctccgcctcccaggttcaagcgattctcttgcctcagcctctggagtcactggtactataggcacacaacaccatgcctggataatttttgtattttttgtagagaaggggtttcaccatgtggcccaggctggtccgaactcctgtcctcaagcgatccaccctcctcggcctccccaagtgttgggactacaggtgtgaaccaccactgcaccatccaggaagcataatatcatgctgactcactctaatgaggcaaagtttgacgtctagtgtaaggtggtgatagccatattttgagtattgttggaaaagaaaaatattaaaatacaatatatatcattcctagaagccttaaaaattggtaaaatgtatttgacattaaaatagataaaactggctaggctcggttgctcatgcctgtaatcccagcactttgggaggccaagggaggaagactgcctgagctcaggagttcaagaccagcttgggtaacatagtgaaacctcatctctacaaaaaattaaaataaaaaaaaatagcggggtgtggtggcatgggcctatagtcccagctacttcaggaggctgaggcaggagggccacttaagtccaggaggtccaggctacagtgagccatgattgtaccactgcactccagcctgggtgatggagcaagaccctgcctcaaaaaagcaaagcaaagcaaaacaaaaccataaaacttctgtaaaccaacgtgaatagagcagcaagacaaagagtagatatgcaggcatcatctgcaaagggtgaaggggcgatatccataatatataaaaagctgccacacatctacaaaaataaaatcaaatgcagccgggtgtggtggctcacgcctgtaatcccagcactttgggaggccgaggcgggcagatcacctgaggtcgggagttggagaaaaaactcgaaaaaaagaaagcaaatacaaaacaggcaaaggacatgaataaaaaattcttagaaaaaatactgcaaacatctaatgagaactttataatatgctcaacttcaccagtgatcaggaaaatacaatgaaactaatagtgagactttttaattcttaaacttaaaaaacacgttgtatccagtgatttcagggatgtgggaaaatgggattcctttttattttgttttgttctgagatagggtcttgctctggagtgcagttgggtaattatagctcactgcagtctcgacctccagggcccaagctattttcctacctcagccacccgggtagctgggactgcaggtgcacacggccacacccagctaatttttttcttttttgttgagacaaggtcttcctattttgcccaggctggtctggtactcctgggctcaacccatcctcccactttggcttcccaaagtgctgggattacaggtgtgagccactgcacccaatcagctcagctatccttaaatattgttggtatcaatgaaaaattaaaaagtgagtatctttgattcagcaattccacctcctgtggattgccatatgttagggtattcattgcaggtacataacagcacttttcctcccagcccccatgcaacttaaccatccatccacaggaaaagaaatgatggaaaagatacaagggaaactttgcagccattagcatgaatgaggctggtcaaaaggactgaaaaggaaaattttcaagatccagtattaacaaatctggaaaaaaaatgcagtattatgtgaaaaaaagcagctcatagaacaatatgcccagtatgaaccattttatttttaaaaatctgtttttttttgtgtgtgtttttttttttttgagatagagtcttgctctgccacccaggctgtagtgcactggggcgatcttggctcattgcaacctctgcctcccaggttcaatagattctcctgcctcggcctcccgagtagttgggattacaggcacccaccaccacacctggataacttttgtatgtttaatagagacggggtttcgccatgttggtcaggctggtctcaaattcccgacctcaagtgatccgcccgcctcggcctcccaaagtgctgggattacaggaatgagccaccatgcccggccccaaaatctgtttttatctaaacacagatcattagcagcagttatctatgagcataggaggattggggtaggaaggtaaaggagaacttttaaaataaacatatatatatgttttttacttaaattttttaaaaatataatcacatgttcatgtattattgtgggacaaaaccaaagagaaaaaaattccttacgtacaaatctttgaagtaaaattacaaaataagacctagatttaagaagtgaagtccgggcgtggtggctcagcttgtaatcccagcactttgagaggctgaggcgggcggatcacctgaggtcgggagtctgagaccagcctggtcaacatggtgaaaccccgtctctactaaaaatacaaaaaatcagccaggcatggtggtgtgtgcctgtagtcccagctactcgggaagctgaggtcggagaatggcttgaacctgggaggcggaggttgcagtgagccgagatcgcaccacagcactccagcctgggtgacagagcgagaccctgtccccccctcaaaaaaagaaaaagagaagcgaatagtgaggagggtgaatagagaggaggcagcattcagtagcaccggtggaagcatttagccaagacagcatgaacttgtggagtattgtttcccatttctcccatattattaaattcaactctagagacatactgactacctgacagtatgtagaatgcatgtcagcatctttctttttcttttttttcttttttcttttttttttttgacacagaatctcgctggagtgcaatggcgcgatctctgctcactccaacctctgcctcccgggttcaagcgattctcctgtctcggcctcccgagtagctgggactacagtcacgtgccaccacgccccgctaatttatcagcgtcttttaaaagtaacgcaagctgggcgtggtggctcatgagatcgtgccactgcactccagcctgagggacagagtaagactccatctcaaaaaaaaaaaaaaaaaaaaggtaattcttgaggaagatttgggtatcattcagtcccttgaggctcagacctctgtggctttcaggtaaaggcatcttcagtcatactctgaacacaagacttaaaataaccagaattctcatcgtcccctacccctgccccctggcatttcattattattatttattttatttacagtcatgtaccacaaagcaatgttttattcaacagaccacatacaggacagtggtcccataaggttttaataccatatttttgctgtaacttttctatgtttagatgatgtttagatacatgaatacttaccagttacagtcacctacagtattcagtatagtaacatgctgtacctgtttgtagcctaggagaaattggctctaccatacagcctaggtatgtagtagaccataccatctaggtttgtgtaagtacactctacaatatttgtacaatgatgaaataacctaatgacacatttcttagaagcatccccatcgttaagtgatgcatgattgtagttattttttaaagcaggagtgtatataaccaaaaaacaaatcaaccgcagaaatattgttttaaaaacctacaatattacggtgtggtctgagatccaaaggcgttcatccaagtttctgacattttacacaactatacaggttatttaatttcagaagcccacctgcaaggcaggatccctttagatcctgctcttgtcaatgaagaatgatgccagcccctcagtactcgagccacgtgtggttctgtatcctgggtttccaaaccaaactcatttagtgacctagggtaactgccatgacctctcaaatgagaataccacggaacagggcatgagtatgaagcccctagcatgtctagtatttgctggtagctcaacaaacattcattccttccatttttatggttctaaaagattttcatcttaaggggcatgaacatggcagacttcagattaatgttgggattgccaggatagccaatgaaacaaaaccaactctttttttgtttgtttgtttgtttgagacggagtcttgctctgtggcccaggatggagggcagtggcgtgatcttggctcactgcaacctccgcttcccaggttggagcaattctcctgcctcagcctcccaagtagctgggattacaggcacgtgtcaccacgcccagcttatttttgtatttttaatagagacagggtttccccatgttgaccaggctggtcttgaactcctgacctcaggtgatctgcccgcctcagcctcccaaagtgcggggattacagatgtgagccaccacgcccggccaaaaccaactctttttatatatgaaagtgaagacttcagtgtgtgcccgttttcccatatgactgccacctaagccctctagttttatggaaatttaacctcttatggaacgtaccatatttatcaaatttaactttttatgaaattaaccaacttatggaaattgactttgtacaacttatttatcttcacataattaaaattgtaattcacggattctgaaacttacattatttgaaattcatatcacgtctctatcaaccagttgctactgattttagcgtaagatttcacattttcagaatatgctctatctggaatatacatataagaaaatgttccgccgggcgcggtggctcatgcctgtaatcccagcactttgggaggccgaggagggcggatcacaaggtaggagatcgaaactatcctggctaacacggtgaaacctcgtctctactaaaaatacaaaaaattagccgggcgtggtggcaggcgcctgtagtcccagctacttgggaggctgaggcaggagaatggcgtgaacccgggaggcggagcttgcagtgagccgagatcgcgccactgcactccagtctgggcgacagagcgagacttcgtctcaaaaaaaagaaaagaaaagaaaaaaaaagaaaatgttccacagttgttttcatttcagggtaaatttacctaggaaagataggaatattttagagaatccctccttttttttttttttttccttttcattgtgctgccataatgttgagaatcaaccagacgcatctgttccctaagcgccacagttcaggaaaagacaagccagatcctagagagttttggttcccaccccagcctggccactgccactcatctgggtccccgtgtcctcactgtgaaaggatagccttggaccaaatattgtctaaggagctttcaagctctaaaattctatgatgagtcgtcaagcaatgaacaacaaactaaccagggaagcaaactaaaatacatttcctgtggccaaattctcagagcccaggagtcaacttatcaaagagggggaggagtcaaacagttcaagagcagtgccacacacacaaaacaagtatcagctaggaaacagcacttttctgcctctatctaaacatgacctaaaaacaaaatataaatagggtttaaaactttaatgtgtatactcagcacacagacttcctattcacaagaagggaagatactttcgcgtaattacaaagtgtagtcctatactttgtctgttcctactatacaaagcataaaattatatacttgcaaagtatgaaaatatttaaatggtataattatctgtatttatgacacttttttttttttttttctgagacggagtctagctctgtcacccaggctggagtgcaatggcacgatctcggctcactgcaacctctgcctcctgacatttaaacaaattactctcaaaagatcataatgtcatggaggtagtttctctgtacttccagggagccacacggaccactctcctgtaatatctattcaaaacaagacccactcatttaaaatccctggtagtctgggaaactgggtggctttccaatgctgagcccctaggccggtctgaaaggtctcctcctcctcctccaggtcaaaacaaaggactgtgaccctaccgtttctgctctctaaaacttacttgcgcagcgccgcacagcctcccacgtctctagcttctttgctgcccctacagacagacatgtagatcattttaaatttaaggccttcactgatttccttaggggaaacagaggaagagtgaacaggagaaccaaccttaagaaaaagtgcttacagagttgctgatctctagcttcagacacagcccccctacttccttatttagccgtgcttaaggtaaaagcccacaacaatagaagtcaaagagccccttcctgaggtgctctatgaaaatttgcatttctgagaggcttccaaggggactgactcaaattcatctttcttttccccaggctggcagttaactgcggaactgcaggataaaacgttcaagtgctggtgaaaaatagggacagcttgcagatgttgtaaaatttggggccgtgaaatcttaacactgccctccaatcttctcacccttttagatgctaccatggacgtttgtttaaaggccctccaaaatgacagtttttggttaagttccaggaagatagggcattattttaatccagtagaaaaagaagaggatatgaccctacagtgtgccagataaagaagtttaaggacaaaacttgccccttgcttcaatacttcatgatataatcggacctgtcgacacctcagtatacacagcaatgagtgtataaacttactgaattaatgtgggcgctggattccgagatgagaaactctgaggtgcaaacaaccacggtatattgtggttccacggaagtttcatcgggtccttaagaagcccttgcttggcctgtttgaatgctgggcataggtcgataaatagagcgtagttgtttaaatagttttacttaagttctgaaatcaactctactttaaatctatatagctgcaggtaatgtaatcaggccatcctcttccaagctggcagccatggcaaaagtccctttctcttggcgcgaattacaaggaaattcaagaaatactttaagatatatatatgccaaagacctggagttaagttactagggtggggctgtgtaaatgtttggtgactcactaaagaaagttgggatctggggtgctggcacctggaggacacagaagaaacaaaagttggggggctggcgaaggtcgctagcacactttatctctgattggcggaagccctcagagttttctttatggcgtcaccgagtacctgcctgtagaaaggccccgtctccgtgacgtcacgccgcattggccaatgaaaggcctcagtctgcgggccccgaggagggttgtgggcccttttttgtgaatgaagcgccacggaacagccctcctggggtccccacgagccgcgtcctgctgtgccccggcgcctacgcagcagcggccgcggccgcggtgggcacgcacggttaccccgggcagctccggccgccagctgcagccccgtcgcctcggccgcgccagccggctgcgggcacctgggggcgggctgggggcgccggccgcggcaggaggcgctgtagcgagggctgcggcgccggtcctgcggcggccgcgggaggcagcggggcaggcgctgtgggccgggctcctcctccggctcctgcgcgaccgcctcccgccgggctctgccggcgcccgccgtccccgcagcgccgctctgcgcccgccgccccgagcgcccgcgcggggctggcgggagcctcggcgggcgcgcgggcgcgcggggccatggtcgtggccccctgacgggccgcggccgcctccatgaagcggaaaagcgagcggcggtcgagctgggccgccgcgcccccctgctcgcggcgctgctcgtcgacctcgccgggtgtgaagaagatccgcagctccacgcagcaagacccgcgccgccgggacccccaggacgacgtgtacctggacatcaccggtgagccggccagtgggcgcgcggagggccccggacggccgcacccggcgcggggccctggcccacctcccaccgggctgcccggggcctccggggccgggccgaaatgccttcgcccccacccccttaaacgccccggccgccacaccccctttaggagcctggctcctgaggagcgccccccgccccgagtttctagctgcgtgggctgcgagctttaactttagcttgtgcaccctcctccaccagcaagatggaccgagggtcacctttctaagttgcgggcgtcagcccggcgcctcgaacctgcagctcctccccgcgggctgcttctgagttcctgtggattccgccttcagggattgcgagcccggttggccctcgcgcgagtcacaacctctgaatcagcccctgaggattccccgagcgcgctgaacgcgcctggcacgggagctgcccctttttggcgttggccaaacccccgctgctccgtagccttgggaccctgggcgccgcgttgcccgtccggcgcgtaagcccgagcccctctcctgggcctcccgcgccctgccccctagcgcgccccccgaacgcctccgcctcccggggtccgctccccgccggggcctcgagaaggaaggtgtcacgttggtggcattcgagccagccggcaagacgaatgtccgggttgtcacttttgagaaatcccagccagccagagcaggtagccaagcagcccttcgatagctgttctgttagtgctgattcgactgttcttggagactcataaatccaatttggcagctgttaggtttgctgggattgacagtgacgcgtgtgaaggcattaaatgtgatgatgtatgtggcaacgctgtgtaaacagcagagctgtccacgattttgagggaattggcagtctgttttcagtggcggggaatgtgtcaacctcggtgcgtggcgttattaaaaactgtttccagcccctagcctttgataaaccaggtaagctggagtggcgagaacattaagtggaagtgtttagacaaacacagacgtttaggagaaataatattctaggttcatggacaatctggaaactaagttcgttttgaaatgaagctgagagcagagcgggtttctcggctttggtggatggcccttgggaaccagagcgggcataggaaggggttgccctgagtaccagtccccggccggtagctgcggggggtgtgcgggaggtgaagcctgctgagactgagaagccaagtcccgctaacgttgtgcccttcccaggagagggcctcgccgaggacggatggggctgggaacgggtgggcctatacatagtttctgcccgttattgtttatacctcttgaaaggatctgtgttgaatgggatttaattttaggacaagtaatgcatttacatggtacagaactccaattctaaaggtgcacaggagtacgtgcagaaaagttggtctcacagtctccaagtgtccttctctagaggcaactactcttcccagtttcttgtgaagccttctagaaataggctgtgcatgcatactatatatactatatattctctaccatacacgtgcgagtagcacacatgttgttttgcacatttttccgttttcatagtgtttcttattagaatgattgttctgagttggtgcatataagactggcttacttgattttaattactgcttaggccaatgtacatacggttttatgaataaaaccattaacaagtacgtatggatttaaatgtttatgtagatttgaatgttttttaacctatttagacagtccctgttgatgaacatttgggttttcaatcagaaggtttgtgacagcaaagtcattggaataaatctttcttcttgatggagatgaaatatgtggctagtcttcgtgaggcagtcaccaattaatcaacttcagaaaaatagaaccaagcagaatactgaggaggggtgcgttacaggaaataaaaatgctatcagagggcaacccgctctggtccccttccacgctgcggaagctttgttcttttgctcttcacaataaatcttgctgctgctaaaaaaaaaaaaaaatcctatcagattgcaagccctaataacggaagggtccagctttaatgtaagggagctccaggggagtaaaggttatagtcacctttccctgtgacttctctaggtgtccctcagtgatagtcttggcttcctggaaaaatgatacttaatcagtctgttgcagtgtgatatacaaggccaattaaagtatcttcagatacagagttcagattactttttattgggcttttgggggaaggcttgaggcctgtcctcagcaagtggcaaactggtcccttccttctcaacgtgtttttccctccattattgttttcttaatttaaaaagcagtgcatgcacacttctaaaaagtcaaacattatcaaatgagtttttttttttttttgagacagagtctcgctctgttgcccaggctggtgtgcagtggctcaatctcggctcactgcaacctctgcctcccgggttcaagggattctcctgcctcagcctcccaagtagctgggaatacaggcgcccgccaccatgcctggctaatttttgtatttttagtagagacagtgtttcaccatgttgtccaggctagtctcaaactcctgaccttgtgatccgcccgccttggtctcccaaggtgctgggattacaggcgtgagccttcacccagcctatcaaatgagttttatggagtcttcctcccttggtaatgtttttcctccttcaattttctgtgcacattcaagtttctggaaattgtgccataccagcaagattagttctctttttttttgagacggagtcttgctctgttgcccgggttgagtgcggtggagctatctcggctcaccacaacctctgcctcccgggttcaagcaattctcctgcctcagcttcctgagtagttggaactacaggcatacgccaccatgcccggctaatttttgtaattttagtagagatggggtttcactatgttggccaggctggtctggaactcctgacttcgtgatcccccccagcctagatctcccaaagtgctggggttacaggcgtgagccaccgcccgcagctgattagttatcttttgatggctgcattatatggccaaatcatgatttatttagtagtaataaatagctggttatttgggggttttccagtccctattgcaaatggctgcagtagcatcaatgtatgtgtctgtttatatgtgtgactatatctatagagtgtatttctagaggtgaaaacgccaggccagagtacatatggactttatccattcctcagtggactttttggctattaggaataatgctgctgtgaacattcatatacaggttgttgcatggacatgttttcagtataacacccaggagtagaatggcaggatcacatggtatctccacgtttaatgttttaaggaactgtcagactctttttccgaatggctacgccgccagcgttcccacaagcaatgcaccaattattccacatccttgccagcacttaatattggattgacaagattctttcacagtggagtaggtttgtaaaaattaatgcatattgtcacttctgtccaccctgcccttaaatacatcattttttaacttagtcccttgacatttttattgcagcctatttaatctgtaaattgaattcccatagatcccaggatacttcgtgtgtgtgtatttaatataggatgcttaatccctatttttgttcctgtcatcatttgttatataatcactattgtttagtatctagccacccacaccactatactgggcatttactcttactaggagcagactaaggggtttaactctcattccaaccccatccacctctcacggagccattcattcacctcttgccatgtgcaatgacacggatttttttacttgaactatactgctagttcagtttcagtccaccatgaaaacaaaaggtcataaagacagtgtaggccgggcacagtgtctcacgtctgtaatcccagcacttggggaggctgaggtgggtggataacctgaggtcaggagttcgagcccagcctggccaacatggtgaaaccccttctctactaaaaattcaaaaattaactgggcatggtggcacgtgcctatagtcccagctacttgggaggctgaggcagaagaatctcttgaaccagggagatggaagttgcagtgagctgagattgcgccactgcattccagcctgggtgacagagtgagactccacctcaaaaaacaaaacaaaacaggcggtgtaaactgtaagcattaaagctaaaaagatgctgggtacagatcagaatgagctgttactagtctaggaaactggaggaagtggggaggttgaggagggttttcaaggaaaaaatactagatttttctatgaacctccttaatgtcagaggtctgaatctttatctctattttcccatcccttaaatagggacctccattcatggcagtgtactttctcctttcctcaggaaaaaaaaatttaaagactctaacactactgcatatatctatgtttgataatttataagatgtaatagttgttgcagagctttgatttattttactatttttatttttaaaatttctgattaggctgggagcagtgactcatgcctgtaatctcagcactttgggaggccaaggcgggcagatcgcttgagcccaggagttcaagaccagcctggccaatatggcaaaacccctactccggaggctgaggtgggagaatcacttgagcctgggagttcaaggctgcaatgagctgtgttcattccacagcactctagcctgggcaaaagagacatagtgaaactccgtctcaaaaaaaaaaagaaagaaaagaaaaattctgattagtaaagaatattggtaatagctactggctaaaagattcttggtggtttgtgttaaatttctttacctttttaaaaacaagttttcgagtgtctgccatgatctaacttttaaagactgtctgtattataatagtaaataattttattggaaaaacactaattgaggtcaggattgccattttaaagcactaattaatggtgatatattggatactcatcaaataaacaaatacagcattgtctcctccctccttcctttttaagatctttaaaattcacagcagacattagacagggaaaatttattcattaattcaagaagtatttattgcatgcttactatgtaaaatagtcatgcatattcattgcagtgatggaagtatatttttcttgatagaaaaggaatgctgttatgtagaacactgagtcaaggaaaaaaattgctttttcttcaagagttttgtgttatagtagattatccagtttcaggaattgaagcccatcatagtgtgtagtgtgcatttttcttcttgcctatgtcttggttctcctttacttacacttaaatttgtctgtaatgtgaatttgttttcttgatttctatgcttgcttaattcttcaacatcttcacttctgatattcatgttagttatctgctttaaatctaattcctcaggcactccaacaccacgtggaggcaacagtttgacagtttcaaatgtcactccttaagtggacatacagagtagttgggcacagacatgaatggaaggtggaataattgtgttgcagaaatggtactgatgccagggagttgccagtcagtgcaaattgtaattgctctgtgcttttgaatgggaaggaatgttcccagtttctgctggggttaggaagagctggactgaaaccacactgtggatttttaggatggaagaaaggcattgatgcacacaagtgacatttcttggaaatttctgagatagtctgtgggaatcactgaattgataggacaggggaaagaatttcaagagatcaaaaccctccacattcccctgtgaagaagccaaagggccagagataaaattgggccacaatgatgtagtttctttttggcaaagccatgactacctgacttttactgttgccagcagataaagctgcttcacagagttgtacataaatgatttattggatatctcctagttagtcctgtgctacttaggctaggagatgaataattacctactgaatttgaggaaaatgagcaaaacaagtacatcattcaggtcttctgcaggtcatgctgttttccaaattgactgtcattaacagccccagttttccggatattttattcattcaacaaatgcataatgaatatgtgcaaatgaatacctactctgccaagctttcttcccctcaagtgctaaaaatagagcactgctagagatagtccctgctctcatggagtttatgttttcagtgttaattgagaaaataacactgggagggtctgagggagaactagcatatagagtaaccatatcgcatattgcggttgaaatctttagggaagaaaaactttaatcaaagagtttttgaagagccaattctatgaggccagctaagctagccactaggcatgaggacactggggaaacctagtctctgccccatcccagggttgagcacagacagattattagtaaccttttggagcctcgatgctttcatctgccacagatttgttgtgagaatgaaatgaaggggatgcatatgaagtgcctggcttgatgcccattgatggccagggctgcatcagtgttctcttgtgtcacacgcgtgacagcagctgcgaggacaaagggcaggctgaggcacagtcatcacggctggaagggtttcaagctaagaagcaaacattcccgtgtacttgcacaaaaggttcagtgaatcagcacagtggaaatgcagtgtgttcctctgtctgcttctgagagcgagctcagggcagaaatgctccagatgaggctggctctgtatttgtcagagcagcggaggaggtttggtgccgtggtgatcatcttttctgccttgggataaatgttagagtttctctttagaaagattccctgtaaaaggaggaataaaccaaagctgttacttcattcttgaggctattgttatgtatttttattatactgaagacttatattgcctaatattaaattgcagctaagcttattgttggggaggtcttcttaaagatgggagacccctctaccatgggagagcctgaggtagaaaataaaacaatatatgaaattatttactgatagaatataaattttcagagtggttaatttaaaaaatgctcttgtatatgttttaaaatagtgtttcacagacgattatccaaaagatttgaaactaatggtgcatattattggcagacagggtctttttttgtttttttgtttgtaaaacaaattgctttcaaaggacctttccatgcttaatgtgtagcagagagacaagttatttggaaaggttgggaataggatataaagaagaaatgagatctttaaatctattttttattaccctgggaaaaatgaattttagtagccagtattttttgttttccttcccatcttagctactgaatatttgtataacctaagtaaatccttcacattaacattgttataaggatctgtaagttgacatgcaaacatggacagaccatctgaacatctcaaagccacgcctcatctagatcaggcatctttatgaatgaggtaagtaggtgcggagttgttgaggacaaatatggaagagattgtattagagacaaacagactggttcgcaggaactaactaatcttcaaatattgtttctttccactatttcatttttagcttccaaagtgagtcatttgatttctagtgttataagaagaattgacgtccatattaggcagggattacttttgaaaacattttccaaaattgattgtaaccttcctaaactcaaggatattgaactggaatgtgtagatctcatctggactctctagtttatatgaaagttttacgcccttttctctctctcttttttttttttctatagcttttcatggatactgctccaacaaaggtattcagatcattgactactttgcagttcttttatatgactttaaactgtagaatttaatctgttagttgtcattcttggttccgtcctttcctgtttgctggtcttaatcttaggtagcagattcagttttctgtaactgtagagcagcattggtatgtttatgacttaagttgaaatttgtctttatatgaaaggttttgttggtttctgtgatagttaatactgaaagtagtttctgcgatatttcattggattaatatgaatgccaggttttgggtggtagatattttttggtaatattcagtttttctttttaaattgaatttcactttcataggctcttgtggaaagggtactcacaatgagttgttataactataacagctactcctgtttttttttttttgtggtcatttagttctttctagacatttatttgactaatagacagatttatatcctatttactgaatttggcaagagggaaatgtcatgaaatgctaacttgggaaacagggaagtgcttctatattctttttttaatttaaaaagtattcttgccgggtgcggtggctcacgcctgtaatcccagcactttaggaggccgaggcgggtggatcacgaggtcaggagatcaagaccatcctggctaacatgctgaaaccccatcactactaaaaatacaaaaaattagccgggcgtggtggcgggcacctgtagtcccagatactcaggaggctgaggcaggagaatggcgtgaacccctgggggcagagcctgcagtgagctgagattgcgccacttcactccaccctgggtgacagagtgagactccatctcaaaaaataaataaataaataaatgaagtattcttattcacgttgactttcaaatgcctcagatacgggcagtaagcaaaaaacaaatctgaatgggtgtgtgtgtgtgtgtgtgtgtatctatatatctttccaatttaaaacaattctaactttaatctcttggtcttttatacagcttctttaatctcagcattatttatattctagaggagcagttctcttagagaatgcttcattcaccagttggctcaaaaatttggtcctattcattgtctttgagtctgaaaagctgaagaagctaggctggataaattaattctagttgcataagatcacatatcaacttcatttctcaggtagttcagttttataccattaaaatttggttggcagtgtactttttacaaaataaaaacatcttgttcctgatgtctgtgatatttattgttctttcaagttctcatttgaaagtaacattactttcttggcactgctttgcaatttatgacattgatctttttatatccaatccataatgcaatactatcattacaaattctgaattctgcaaagccttctctcaattttaggaccatctcagctgaatcattctttgcgttttgctcatttattatctatatttatatgaatggtgctatggaattaattaatgtatccattcaacaagtatttattgagtaactacttgaattgggccaagtgttattaaagaatggaggggcaagggatgtgaagatttataacatgccccttttccctgaagactgagaaagaatacactcttaaatcatcatctgaatgaagacaggtaatgaaagaattagtcattatgtagttttgctcttttcatcatttaaatagcatcagtttgaaagaattgtgtgttggaaatgtcactcgatcattcctatacaaaatgaataatttggtctgggcgcagtggctcacgtctgtaatcccagcactttggggatgccatggcaggtggattactggaggacaggaattcaaggccagcctggtcaacatggtgataccccatctctactaaaaatacaaaattagccaggcgtgttggcatgcacctgtaatctcagctactcaggaggctgaggcaggagaatcacttgaaccagaggttgcagtgagcagagattgtgccactgcactccagcctgggtgaaagagtgagactccatctcaaaaatatatatatatgaataatttttccaatgtctggtgaaaatctgtcttgtgtgtcttttcgtgtgtgtgtgtgtgtgtgtgtgtgtgtgtgtctgtgttttaacctttaaacaacagggaatagtgtcattttggtatgtaactgatcatatataagtatatgttaataattcaccgaaaaccctatctctattaaaatacatctaaaggaaaaggtctacatttcaattagttctatatctctaatttggatctcttgctatcccagaggatataatttaaaataagatttcttgtttattctcggtaagaagtaattacagagcacctttaagctgagtattgcttcttaaattgaaggcactaaagataaagattgctaaatatttcgggaactagatttaactgtgtgacttgaactgaaaagcattctaattttccattcttttatgggtgctggggaagaactgctttgacatgaatgtataatagaattaaaatgtcggtcttaaattttggggagttgttctcagtttgctcttggaatttattattgtaatactgtcattagatagtttgttggaagcagctaatacgtgaaagtgaagcatcttaatatgcatctcttttctttctgacaatgaactgtcaaaaaagctttgagtttatctaacaaacacagctgaggctgggattttaactccactattaatatattctaattttaaactactgtaactgaaagggcatacagcactaattcaatccagacatgtttgagtgcgtttgatagtctcatccttgtaatagctgctgaaaaagatgtggtagagatttcagactggaccactgacgtctgggaattgacactagcacacagactgggtcaggcaaggtacaacctggtgccgccagctgttttgcatggaagaccttatctgtaaaactcatagagagtcaaacaagatgtgtgcctctgaatgaatgggatccttggaaaggagttttaaaataggttttaaaggttttctattttcccctccagaaccagcaggaactgttctggatcacagcaacacgagtctgctttctgcttcttggcagagccgttgcccctgtggtggcagttgtgtggtgggtgatagctgggagtgggaatcgactctactccagcatgagggagagattcttttccaacttccccagacccgtcccacattgctcgtgtattctgccactaacaagaatgaagacatcacattggccgggcgcggtggctcacgcctgtaatcccagcactttgggaggccaaggcgggtggatcacgaggtcaggagatcgagaccatcctggctaacacagggaaaccccgtctctactaaaaatgcaaaaaaaaattagccaggcgtggtggcaggcacctgtagtcccagctactcaggcggctgaggcaggagaatggcgtgaaccctggaagcggagcttgcagtgagccgagatggcaccactgcactccagcctgggcgacagagcgagactctatcttaaaaaaaaaaaaaaaaaaaaaaaaagacatcacgtttaacctgaagtgaataacagctttgctccaaaatgaaaaaaaaaaaaaatttaatgaaatctgtcttactgaggaaggcaggaaaaggaagaaatacctcaaagcatcccttatccatgggggccttttcaggtagcattgatcagatttttagagcttaaatttatggattcagaagacaaccatttcctgccacagtgctaatagaattttttcttaatgtgagagttttgggaatttccaaaataaagatatgtgggatattctgaaagctaaccattaaattcccaataaactcagatttttttttgttttttttaatcaaagctctggattaggaattcttatttaaatttttttttttttaaatttttttgagacacagtcttgctctcttggccaagctggaatgcagtgacacaatcatagcagcctccatttcctgtgctcgtgatcctcccacctcagcttcctgagtagctgagactacaggtgcacaccaccatgcccagctaatttttaaaaaaattattagtaggccaggcacggtggctcacgcctgtaatcccagcactttgggaggctgaggcaggcaaatcatctgagatcgagagttcgagaccagtctgaccaacatggagaaaccccatctctactaaaaatacaaaattagccgggcgtggtggcgtgtgcctgtaatcccagctccttgggaggctgaggcaggagaatcgcttgaacccgggaggtagaggttgcgttgagctgagatcacaccattgcactccagcctgggcaacaagtgtgaaacaccatctccagaaacacacacacacacacacacacacacacacacacacacacacacacacacaaacttttagtagagatgagatctcattctgttgcccaggctggtctagaactcctgggctcaagctgtcctcctgcccaggcttcccaaagtacttggattacaagcatgagcactgcacctggctggaactcttagtttaaaatgatttcagagaacaaataatattcttttttttttttttttttttttttttgagatggagtcttgccctgttccccaggctggagtgcagttgtgcgatcttggctcactgcagcctctgcctcctgggttcaagtgattctcctgcctcagcctcccgagtagctgggactacaggcacacatcaccacacccgcttatttttgtatttttagttgaaatggggttttgccatgtaggccaggctggtctcgaacttctgacctcaggtgatctgcccacctgagcctcccaaagtgctgggattacaggcatgagccaccattcccgggcagcaaatattattttaatatagagacttatgaatataaatattaagttttgttgtttaatgctataaaagctattttttagaaaaagccaattttttgtgtacctgttacacatcccattgaacataacaccatcatgcagtgctgcttcgttgtaactatttgtctttgaaaaaaacaattttttttttgaggcaaaatttcgctcttgttgcacaggctggagtgcagtggcttaatcttggctcgctgcaacctccacctcccgggttcaaacgattctccagcctcagcctccctaagtgctgagattacaggcatgagcccctgcccctggcccttaaaatattttactaaaactaagtaggcatatatatgtctgcagtcagtgtcttgctttgcattccccagaacagatgctgagtcaaggatccagtgaaagtacttcctttgggaaatgatcccaggaagcactcacaggggagtggggaagtgagatggtaaggaaaggcaagccacaaatagctcattatcaggcaggttactactgtgggaatggagttagaggccgcaggggaaccctgggagccagtataggacacacgctgcagagttttcctcactgagggttgagggcgtgggatatttatatgccagtcacttacccctgcttgtgtcttgctggggagtggggaatgatcattttcaagtcctatgacagtaggcaaaatggactctttaggccagagaaagccctgaaagaaatagtggtacaattggaaattggaaattgtgctgaaaatgggaaggggatatggctggttcttaacagcgcctgctgcattccattacgttattgttattttttttttcctctgtgctcttagtgctattattgtaagttcttagctggttccctctcaaccattatccttaaattgaatgtgttattgtcactatgttgtgtcctggtagggcatttttgacagtgaatgttgagaaagcatatgcatgtgacagggcggatttgttagaagcagtggaaaggtgagtactaaactgggtgtttaaaatgcaagcttcagctgggcacagtggctcacacctgtaatcccagcactttgggaggcagaggcgggtagatcacctgaggtcaggagttcaagaccagcctggccaacatggtgaaaccccctctctactaaaatacaaaaaaagtagctgggcatggtggtgcatgcctataatcccagctacttgagaggctgaggcaggagaatcgcttgaacccaggaggctgaagttgcagtgagccaagatcgtgccactacactccagcctgggggacagagcaagactctgtccccctcctgccccgccccccgcaaaaaaaaaggccaggtgtggtggctcatgcctgtaaggcaggtggattacgtgaggtcgggagtttgagaccagcctgatcaacatggagaaaccctgtctctactaaaaatacaaaattagccgggcgtggtggcgcatgcctgtaatcccagctactcgggaggctgaggcaggagaatcgcttgatcccgggaggcggaggttgtggtgagccaagatggcaccattgcactccagcctgggcaacaagagggaaactctgtctcaaaataataataataataataataataataataataataataataataataaatgcaagcttcacgaggccttttcaaggaaatgtttaaggaaaccaggtaaagataagtatgcaattaaggacttggaagttgtgtgatttttatgaaaggctttataaacatcactgtagcttggaagtttgactaacagttgtgtaactagaattatggccagtgacaggtcctgacttcggtgaatgtggagtgactggaagagctgagccattgccagtgtagcatgccaggaatggatctccacagagactgtggattccgttcaagttccatttccaggaactcctcgtccttagctagacagagtgtgtgcctgtaaagtcaaccactttaagtcttttatttcgaataagggaagataacaaatactttggcactcttgggaatgtttcaaggtggatctactggtttaattgttccagggtttctaatctgtgtgtcacatgcttacacgaagctaggcaatagggagatcacaggttaccgcatgtgatgtcactcagtgctgtttactatcggtacctttttggatgctttcctctctttattaaaatcttgcgcagtgtcttttcattttttcttcagaggtaattcagtctgttcttactggaggggaaaaataagtcatagtgctaatcttgtaagaagtggaatttaacatgctcaagctttcacatgggatcaagattcaataataaaagccttgacgttggaagcttaatagttttagaaataatttttctgcagtttctcgaatgtcagtgggcagcatttagaatgtgtttgactaagtagtgctggtcttcctcccctttaagcctgcacttgtggtacagccaggtttctagtttcatgacgcatttatcattggcctatgcctggcccttggttaggcttcctgtatttttcaaatgtggccaactagacagcattatacctcttcacctagagttgctttcttttttttaagtttttcattttattttgtttattttttaataggtaatatatgcatgtaggttcaaaattcaaaagataacaaaagagtaaacaacatagactaaggcactttcctgttttccctccccataatctgtcaatattactaacctcttgtgtgtcttaccagagatgttttgtgtatttgtgtgtgtgtgtgtgtgtgtgtgtgtgtgtgtgtgtccgtttctatcacctcaaatgacaccacattattctcattgttctgcatcttgttttttttcactgctcttaggttactcaatgagcacagaattggaacaaagggagatggaagatcttaacggatggttaagcttctggtttccatccagtagctggctggaagctgatggtttcaagcttctctaagtcgagatgtggtgataatagccttggtgtagttactgtctcttcagtgctaaggctcctgctaaacctgcgtctctccccagcccacaaataaagtttctatgatataggtgctcattacttttaaaaaaagaacgcagagagagagaaaaaaaatcatcagtgatcctaatagcaaagaatagctaattccattagttaggttagacttggttgtgtggtgatatagtttggctgtgtccccacccaaatctcatgaattgtagctcccacattcccatgtgtagtgggagggacgctggtgagaggtaattgaatcatgggggcaggtctttcctgtgctgttctcatgatagtgaataagtctcatgagatctgatggttttataaaggggagtttccctgcacaagttctcttctcttgtctgctgctgtgtgagatgttctgccatgatcatgaggccttcccagccacgtggaactctgagtctgttaaacctcttttgtaaattgcccagtttcggggatgtccttatcagcagcgtgaaaacggactaacatatgtggtaataaaaaataagacccccaaatctcagcagctgaaaatacagacgtaattcttttttgcagaggtgctgtgcttcagcagggaactgtgcttgttgtgactgcttggggacatgggctgatgagcagcatcttctcagtattgctggtccctgtgcagagggaaaagagctgtggaaggtctggaattaacatttagatgcctttttccactcatagctcacaggccagaagtaatcaaatggttccatccaacaggccagaaatatttggtgaacagcactaatgactaccacagttagtttttgttttgttttgtttttgtttttgtttttgtttttgagactgagtctcgctctgtcgtccaggctggagtgcagtggcgcgatcctggctcactgaaagctccgcctcctgggttcacgccattctcctgcctcagcctcctgagtagctggggttacaggcacccaccaccatgcccagctaattttttgtatttttagtggagatgggatttcactgtgttagccaggatggtctcgatctcctgaccttgtgatcagcccacctcggcctcccaatttttttttttttttttttttcgagacagcgtcttgctctgtcgcccaggctggagtgcagtggtgcgccctcagctcactgcaaacccccacctcctgggttcaagtgattctcctgcctcagcttcccgagtagctgggactgcaggcgcctgccaccacacccggctaatttttgtagttttagtagatggggtttcaccatgttgcccaggctggtctcaaactcctgacctcaagtgatctgccgcctcggcctcccaaagtgctgggtttactacaggtgtgccacgcccggcccttttgtaagttttttttttgagacggagtctctttctgtcaccaggctggagtgcagtggtgcaatcttggctcactgcaacctctgcctcccgggttcaagcaattctcctgcctcagcctcccaagtagctgggactacaggcgcacaccaccatgcccaactaatttttctatttttagtagagacggagtttcaccatgttggccaggatggtctcaatctcttgacctcatgatccgcctgccttggcctcacaaagtgctgggattacaggtgtgagccaccacacctggccccacagttaggtttttagattgttcagagcatgtttagatacacagatatgtctatagagaaatacacttttttttttgagagggagtcttgctatgtcgcatatactttcacatcaacaagataaatattccaagtactatcatatcattagtttcttcctatttcatataatgtagtggaatattttattgtcataaacacttctaaacatggatatctttttttagtggatgcatactgttccattatatggttgcataataatctgtttccttatgtatcctctactgagaaaaatgtacataaattcatttgcataacattgggtagagaattttaggagttgtggacaccatccctagccaagccatggattgctgttatagtttataggttataaacacaaacgctaggccgggtgcggtggctcacacctgtaatcccagcactttgggaagctgaggcaggtggatcacttgaggtcaggagtttgagaccagcctggccaatatggtaaaactctgtctctactaaaaatacaaaaattagccgggcttggtggcgcacacctgttatcccagctgctcaggaggctgaggccggagaatcgctcgaactcaggaggtggaggttgcagtgagccaagatcgcaccattgcactccagcctgggcaacagagttagaccccatctcaaaaaaaaaaaccacaagctctatttagaatactctctccttatcccattaatctccctcacaaaagtgtaataactttttacacttgatattttggtaggtaaataaattcacatggttctgagaataagtataaagtgaagagcctctcatcagcccctccttgccctcatctgtccagttcttcttacccctgctatccctcacagattttaatttctcatttccctccagaatttttttaaaaaatgtatttgcataaaatatatatatatatataatttttttggtagagatgggctcttgttatgttgtgcaggctggtctcaaacttctggcctcaagtgattctcccacctcggcctaccaaagtgctgggattacaggcgagagccatcatgctcagccaagattctttaaaaagttattattttaccctttttattttggaataaaattggatttatagaaaagttacatttagaaataacggccaggtatggtggctcatgcctgtaatcccagcactttgggatgccaaggtggatggatcacgaggtcaagagattgagagcatcctggccaacgtggtgaaaccccgtttctactgaaaatacaaaaattagttgggtgtggtggcatgcgcctgtagtcccagctacttgggagggtgaggcaggagaatcgcttgaacctgggaggtggaagttgcagtgagctgcgccactgcactccagcctggtgacaaagtgagaatccgtctcaaaaaaaaaagaaaacaaaagaaaagttacagaaataatacagagagctcacccggtttcctgaaatgaaagcatcttatgttgccgtagcatgtttatcaccactaagaagctaacatcattgtgaattattaactaaacttcagattttatttggatttccccaggtttttcattagtatctttgttctgttcaggatacagtccaggacactacattgcattaaacagattctctttgaattgagagatagcatgtgctccatgtggttctgcatttagtgttctcaactgatgatgtcataattcattgatttcaaaatccaatggaatgtaactattatttttgagtacttcttctcctttttttttttttaaacggagtttcactcttgttgcccaggctggagtgcaatggcgagatctcggctcactgcaacctccgcctcctgggttcaagtgattctcctgcctcagcttcccgagtagctgggattacaggcacccatcatgatgcctggctaattttttgtatttttaatagagatggggttttgccatgttggccaagttggtcttgaactcctgacctcaggtgatccgcccaccttggcctcccaaagtgctgggattacaggtgtgagccaccacacccggctctaagtacttctaagaaaggaaaaatgctgccaattataattgtaagttactaattataagatacggcataatttcagagatgttcaaatgtgagaaaagtacattttagatttaatggaatatgatacatcttggaaagatttcaactttatttcacagaattttctcattctttttgtacctacatagaatttcactttataatatacaaaagatctttaagcaagcccttattgatactcatgtggattgttttctgtctttaggtattaaaatgctgtattcaataatttgggacatatatgtcatttcacatatatacagatgtgtatcagggtgacattccaaaagtgcactgctgagttagaggtatatgtatttgtaattttgatggaagctttaccaatttacagtcccactagcaatgtatgagaatagttttttttaatgacttcacaaataggccgggcacagtggctcacacctataatcccagcactttgggaggccgaggcaggtggatcacaaggtcaggagttcaaaaccagcctggccaagatggtgaaaccctgtctctactgaaaatacaaaaattagctgggtgtagtggcaggcgcctgtaatcccagctactggggaggctgaggcaggcgaatgacatgaacccaggaggtggagcttgcaatgagccaagatcgtgccactgcactccagcctgggtgacagagcgagactccatctcaaaaaaacaaaaaacaaacaaaaaacacttcacaaataaagtaggttaccaaacttttagatttttgccaatctaatgtttggaaaattatagtctcaatgtagttttcatttgtatttctcttatgagtataggttgagtttctgaaaactggccataaatattctttgcacatttttctattgggctgtttccaatttttatgcattaggctctttcagtattagtgacattattatctgtgatgaattacaaatgtattttctttttgtcgtttaccttttgatttgcttatacttgattagtgctttgtgtttgccacacaaagtttatagctgactctgttaatcttttctattatggcttcgggattttaagtcataattgtactcaagaaatttattaaggagttcctctatgttttcttccatttctcccatcctagcctttatgctattgtccttatgaattttacttttacatatattataaatcctgttacttttgttaattttgtcaaaataatcatcttttaaagcaacttaaatgaggacagtaaactcttaaacatttctccatgtagtagttagcatttctagggccattcattccattgtataaatacagatttccaactggcattttccttctacctggaagatatcttttaacattttttatagtgtagatctgctagtgataaactctttcatcttctgaatgtctaaaaatgtcttcattgtgcctttgtttttgaagattttgcttaatgttgaactctaggttgacatttttcattttttttctttgaatactttaaagatgtttctcttctgtctttttttttttttttcttttttggaaacaaggtctttctttgttacccaggctggagcgcaatgacacaatctcggctcactgcaacctccgcctcctgggttcaagcgtttctcctgcctcagcctcctgagtagctgggatcacaggcgcatgccaccatgctcggctaatttttgtatttttagtagagacggggtttcaccatgttggccaggctcatctcgaactcctgacctcaggtgatccacctgcctcggcctcccaaagtaccgggattacaggcgtgagccactgcgcctggccctctcctgtcttatcacttgaattggtagcaacaataaatctgatagccttctttgcttccctgtgtgtaatatttcttttttctctggctgcttttaagattttctcttgttggctttgaacagtttatgatgtgcattggtgtggttttctttatgtttcgtgtgcttgagattggttgaacttcttggatctgtgtgcttacagaattcatcagtttagaaagctctcagccattacttatgtaaatattttttctgcctccttctccttaacatataattatctgcttattagaccattttatgttgttgtatagctcactcttacacttttttttttttttttaaagatagagaaggtctccatctgccgtccaggctggagtgtagtggcgtgatcatagcccactgcagccttgacctcctggattcaagtgatccgcccacctcagcctcctgtagctgggactacaggcacatgccactactcttggctaatttttgtattttttgtagagacaggattttacaatcttatccaggctggtctccaacttccgggcccaagcaatcccccctccttggcctcctaaaatgctgggattgtaggagtgagccactatgcctgcccttcatttttttgtattgttttcccttctcttttcatttgtagagtttctaatgctgtgccttcaggttcactaatcttttcttatgtcttatctgccattagtcctatccagtgtatttttcatctcataattgtagtttttatcttcagaaaagttcagtttgggccatttttatatctttcatgtctttttgtgtgttttttttttttttttgagatggagtcttgcactgtctcccagcaggctggtgtgtcgtagcacaatctcggctcactatgacctctgcctcccgggttcaagcaattctcctgtctcagcctcctgagtagctggaactacaggtccgtgccaccatgcccggctaatttttatatttttagtagagacagggtttcaccatgttggccaggctagtctcaaactcctgacctcatgatctgcccccctcagcctcccaaagtgctgggattacaggtatgagccatcatgcccagccttttttcttttcttttctttttaaataacagctctaattcacatatcatgcagttcaccaacttaaaatgtgtatttcaatggtgtgtttgttgaaagttatattttatatagtattcaaatgtcaattatttaactttaaatatttttaaagcttttttaaataaatggagtatttgtagagttgtgtacctgttaccatgatctgattttaatatattttcattatcccctcaaaaatgctcatacccaatggcagctattcccttcccctcacctctcccagccaggcgcaactacgaatctactttctctcactacttatttcctattttgaatatttcatataaatgagatcgtactatttgtgttcttttatgcctggtttcttttcatacagcatgtttgtgaggtccacctattttatagtatgtatcagtacgtattccattttatggctgaatattgcattgtatgacggtatcatattttgtttaccagttgatgcacattcaagttgtttctccttttaggctattatgaatagtgctgttaagaacattcacgtacaagtttttatgtgggtgtgtataggtagatgcctatcttaccgatatatggaatggagttatagtaacttgtagcgtctttctctgctgactccaactgtatgtcagttctgagtctgttttggttgattattttctttacgtgtcatgcttttctgcttcgttgtatgcctggcagtctttgactggatgctgaattttacttcatgggtgttaaatattttcgtattgttataaaccttaaactttcagagacgtagttaagttacttaaacagtctgatactttcaggtcttgcttttatgatttgttaggcagacctggaccaatgcttagttgagggctaatttttctttttctttttgagacggaatctcgctctccctccaggctgaagtgcagtggtgtgatctcagctcactgcaacctctgcctcccgggttcaagaaattcttctgcctcagcctcctgagtaagctgggactacaggcacgtgccaccacacccagctaatttttgtattttagtagagacggggtttcaccatcttggccaggatggtctctgtctcttgacctcgtgatccgtctgcctcagacagccaaagtgctgggattacaggtgtgagccaccgcgcccagccaagggctaattattatttatttcccgagtactccgttcagtgccccatgatgacttaggagtgctgagaacaagcactcatgccagcctgtacgattctgctgtaattctttcagatggttctctcctgggcttttttttttttttttttttttttgagacagccttgctctgttgcccaggctggagtgcagtggcgcaatctccgctcactgcaacctctgcctcccaggttcaagtgattctcattcctcagcctcctgggtagctgggattacaggcatgcatcaccacaccctgccaatttttatgttttcagtaaagaggggattttgacatgttgcctaggctggtcttaaactcctggcctcaaatgatccacctgccttggcctcccaaagtgctgagattacaggtgtgcaccaactgcggccaccctctcctgggtctttagtagttttctcacttgcatgttctatgttctgttggattctgttggatactttggaccctttgcaaatctctagggttctctattctgtgcagctttcttctctttggttactctgtcctgggagctcttgctgccttgattttccctggactcagctccatgtcgttaattcagggcatctgccaggttctgcctcagtttactctttgtgcagcagcggtaagccaaagcagttgcagggctcacctttttgtttcctgtgtctcagggattgcctgtgtccttcattgcttgatatccagtcttgaaaaacgtataatgtattttggtttttataatttaagttagttgctttttccagaggaatagtaaatctggttcctgtcgctccatcttgtctagtattggaaatcttatgttttgttacagattttttgtttttattttcttacgtctaaatattttcttcattttaagtttactcagttgtgaggtgagagttactttatcttttcagatggctacctaataccatttatttacatgacatctggtttatcatctttatcatgtattacattcctgaatgtgttcgggtctatcttaggacttctcttgacatctcttctttgtgtatgtctgttggatgccagcaactgtctgttttagtaacagaggccttttaatatctttacatatccaggtgtgctatccctttttagagcttttttcccctcccagctttctcccaaactcttcttgtttgttcttccttatttttccatattaactttaggatccacttgccttccacgaagaaacaaaaaatcctgttaattatttatatgaattaacttaggcagaaaaaaatatttataatgacttgtctgttcacaaacatggtatggcttgcttttttttttttttttttgagaccaagtcttgctctgtcgcccgttctggagtgcagtggtgccatctcagctcactgcaacctcttcctcctgggttcaagaaattctcctgcctcagtctcccgaccagctggtactacaggtgtgcaccactacgcccagctaatttttgtatttttagtagagacggggtttcaccatcttggccaggatggtctctatctcttgacctcgtgatccgcctgccttggcctcccaaagtgctgggattacaggcgtgagccaccacacctggctatagtatggctttttgactgctgaagtcttcttttgggtccctcagtaatatattaaaatttcatacctgtcttgcacattacatgttaaactttttcttagatatttaggaactacaaatggggtttttaaattctattttatttcacatatgaaccattttctgagcagttaacaactcttacggcaaacattttaattttatttaactttgactcctcaatgtttagaaattaaagactgaggagttattgtaacctccataatactacatttacattgtagatgaataccaaatggctttttttaaatttaataaaattataggaattaacctttctgatcttgtaggtattttatcttattatagcccttataaataagactttattaatgtccttgtttagcaacctgtttttttgtttttgttttttgagacaaagtctcactctgttgctcaagctggactgcagtggcgcgatcttggctcaatgcaacctccacctcccaggttcaagtgattctcctgcctcagcctcctgagtagctgggactacaggcacccaccaccatgctgactaatttttctatttttagtagagacagggtttcactatgttggccaggctggtcttgaactcctgaccttgtgatccacccacctcggcctcccaaattgctgggattacaggcgtgagccgctgtgcctggccagcaacctgtttttgaagaataagttacaaaactgatggtgaacatatttcagtgaatagatttctttgctcgataagtgcataggaatttgcttgagaagcaaaaacagctttttggctgggtgcggtggttcacacctgtaatcccagcactctgccaggcagaggcgagtggatcacttgagtccgggaattcaagaccagcctgggcaacatagtgagaccgtgtctctacaaaaaatacaacaattagctgggtgtggtggcatgtgccagtagtcccagcaatgtgggagactgatgaggtgggatcgcttgagcctgggagtcaaggctgcagtgagctgtgatttttccactgtactccagcctgggcaaaagagtgagaccctgtcttagaaaacaaaaaaacccttaaggttttacattgctgaaagaaattaaagacaggccgggcgctgtggctcatgcctgtaatcccagcactttgggaggccgaggcgggcagatcacgaggtcaggagatggagaccatcctggctaacacggtgaaaccccatctctactaaaaatacaaaaaattagccgggcgagttggtgggcgcctgtagtcccagctactcggaaggctgagtcaggagaatggcgtgaacccgggaggcggagcttgcagtgagcctagatcgcgccactgcactccagcctgggccacagagcaagactccgtctcaaaaaaaaaaagaaattaaagacacaaataaatggaaagacatcttgttgcttgtgaatcggaagacttaatattgttaaaatgttaataactacctaaagctatctgcagattgaatgcagtccctatcaaaatcctaatggcattttgtgcagacttagaaaaataatcctaaaatttatatggaacctcaaaggatattgaatatccaaaacaagcttgaaaaggggaaagaaaaaaaaagctagaggcttcaattcctgatttcagaatatattacaaagccacagtaatcaaagcagtatgatactggcatgaggacagaccaatggaatagagtaaacagcccagaaataaacccttatgtatatggttaaatgatctttgacaaagataccaagaatttgtgtcttcaacaaatggtttgggaaaactggatgtccacctgcaagagaatgaggttggactcttaccttaccctagatacaaaaattaatgcaaagtatcttaaagacctaaacataagaccagaaactataaaagtcttagacaaaagcataggaaaatgcctcatgacgttagatttgggaataatttattggatatgataccaaaagcacaggcagcataagcagaaatagacaagtgggattacatcaaactttgaaacttctgctcggcaaagaaaacagcagagtgaaaagacaacctagaatggaagcaaaccgtatctctgataaggggatagcacaaggggctaatatatacaatatatacgcaactcctgcaacttaacaaatgaaaacaaaccaattaaaaaatacgcaaagggcttgaatcaacagttttctaaagaagatatacacatgaccaatgagcgtatgaaaactgctccacagccagagctgtggcatgcacctgtatgtaggcccagctacttgggaggctgaggtggaaggaccacatgagcccaggagttccaggccaggctgggcaaaagagaccccatctctaaaaaagaaaaaagatgctcactgacactaatctttagagaaatgcaaatcaaaactacaccttttaggatggctgctgtcaaaggaaaaaaaaaaaaaaccaggaaataaatgttggcgaggatgtggagaaattggaagtcttgtacacttttggtgggaatgtaaaatgctgcagttgctatggaaaatagtatagaggttcctcagaaaactaaaaattgatccagcaatcccactgctggttataccaccaaaagaattgaaaacaggattgcccagtggtacttttacacttatgtccagtccagcatttttcacaagagccaagaggtggaagccacctcaatattcatcaacagatgaatggaaaaagaaaatctggtatgtatctaacagtggaatattatccagctttaaaaaagaaagaaatcctgtcatatactacaacatggatgaagcttcagggcattatgctacgttcaataagcttgtcacgaaaagacaaatactgcttgattccatgtatatagggtatctaaagtagtcagactcctagagacagaaagtagaatggtggtttccaggacctttgggggatagggaaaagaggagttcctgttcagtggatatagagtttcagtttagcacggtgaaaaactttgagatgtattgcgcagcagtgtacatacaagttaacattattatactgtgctcttaaaatggctaagatggtaatttttatgttgtttgtttttgaccacaatttaaaaactttttttttttttttgagatggagtcttgctctgttgcccaggctggggtgcagtggtgcaatctcagctcacggcaagctctgcctcccgggttcacgccattctcctgcctcagccttctgagtagctgggactacaggcacccgccaccacgcctgcctaattttttttgtatttttttagtagagacagggtttcaccatgttaaccaggatggtctcgatctcctgacctcatgatccacctgcctgggtctcccaaagtgctgtgattacaggtgtgagccaccgtgcccggcctaaaaacttacggtttttaaaagctcggtgttacatctatttctatttgcagactaatcttaatattctatttgtgtagctattctttcctaaattacattaggctcctgaagatcaagagtccagatttcaaagaatattttacttggaccttaagcaaataagtgcatacacctgacaaatgaaaaggttacttttaggaatggaatggaaatatgaaattagaattgtttaggaaaatttaggctgtgtgattaagcataaacagaattcttgcatattcattcaagttaaacaaaaaaccaaatatacttactaggtgtatttttttttttttaagacggagtctcactttgttgcccaggctggagtgcaatggcgcaatctcagctcactgcagcctgtacctcccaggttcaaacagttctcctgcctcagccttccaagtagctgggattacaggcgcatgccaccacgcccagctaatttttttttgtattttagtagagatagggtttcactgtgttgcccaggctggtcttgaactcctgagctcaggcaatctacctgcctcggcctcccaaagtgctaggattacaggcatgagccactgctcctggccaccagggtacttttaatcaaaatgtttaatactttatgaatttcattctacagaaagatttaactcctgctttctagtggtattttgtctatgataactatccaaatgatactacaaaatttaaatctacttcatagttacaagctaaacatcactttgttataaaatagataataaatataattcagtattgacattaaaattcccagatttttactgacttcttctaaaaccgccctttttatgtaagaaaaggtagtgttttaaaaactacaaatttggctgggtgcaatggctcacgtctgtaatcccaacattttgggacgatcacttgagcccaggagtccaagaccagtctggttaacatagcaagaccttgtcttagccaaaaatacaaaacttagccaggtatggtgttgtgtccctgtggtcccagcaacttgggaggctcaggtgggagaatcgcttgagcccaggaggtggaggccgcagtgagccttgattacgccactgcgctccagcctgggcgacagatgagccctatcgcaaaaacaacaagaaaagccctataaatttaagtacacttcctattctggataaaactaactcaaaattttaatgtcaatttgggaaacttagtgagctttttgccctcaacatcaaagtataagcaaatttctcttaaaatcctttggcttccagtggagttgctgacaggctatgcacagcagtgggctgctgcagagagctgaatgttactgctgtggaaatgtgttgttgtaaaagccggcttataagtaaaagcagcacactcctttgctgaaagccctgcgtgggttaatagggggctttcagtgaacagcccactccctctcctgcgtttccacacagttctgctgcttcctgccccctcccctggacccccagagtgtttcttctgtagtattgcagcccccacaagaagcaaagctttgaagggaattgaaactttctatgatgtgggtttcagggtttttttggttttcctttctggaatagaaaaaaaaaattaaatcttgaaagccatatcgtataaagtaggcagtctggaagtcacttacctgagccacttaattatttttccataggctttccttgaaataacactatgatataataatgagaaattgtgggggcggggcggggagttggcttcctttaaaaaaattgctctggggcacttgttgatatatgtgctccttcgtatttgttgattcggaatacattggctacatatgttcatatatcaccctgtcatcacaagccctgtgcaggctacttactcttccttggtgccgcctctcccattcgtaaaataagggtgctaagacctatgtcatcagactggtgaaaggtgaaggagatcacatgtataaagtgcctagactaagatgtactccatggagcccaacctctgtgtacatattcacttgtttatgaaacaggcattagctgagtgtctggtgtgagctcagcagtgcagggccaagtgtatctgcccaggggtgcagtgatgcctggtgctgggatcaaggctcttggcagcaaaggccctcaaggcagaaggaacactatttgctccttgcttccgtggaggccttttgtctgtcaggatcccccttgtcagaggctacagattagaaactgataggtttatttcctccgtgtgtgctgtccattgtagtgaccactacccacatgtggcagtggctcctgtattagacagagcagatagagactttccctttcttgcagaaagttcttttggatggtgatgttttaggtggtgagagagcttggcctagtcactgttttctctttttttttgttgtttttgttttcgagacagagtctcactctgttgcctaggctagagtgcagtggtgcaatctcttttcactgcagccaccgcttcctgggttcaagcgattgtcctgcctcagcctcctgagtagctggaattacaggcacacgccaacacgcccggttaatttttgtatttttagtagagacagggtttcgcggtgttggccaggctagtctcgaaatcctgacctcaagtgatctgcccacctcagcctcccaaagtgctgggattacaggcatgagccaccgcgcctggcctgttttctcattttaaatccagttcatgtttttttaaagtagtggggttgatagaatatagggaatggcagataatctattaaagctaacttaggccctatttccatgaattttcctttgtgccaattttaggacttgaagagccactttttaaaatttttaaaatatggactgggcatggtggctcacacctgtaatcccagcactttgggaggctgaggccagaagattgcttgagcccatcctgagcaacatggcaagaccccatctccacaaaaaaatttaaaaattagctgagtgtggtggtgcacacctgtggtcccagctactcagaaggctgaggtgggaggatcgcctgagcccagtaggtcaaggctgcagtgagttgtgattacactactgcactacagcctgggtgacagtgagaccctgtctataaaataaaattatttaagtaaacgtcttttgcagactgaagaaggatacaattactatttcaagaatctttaaaagaatttttctacttaaccacatttatcttttctggtaggtcttttaaagttgcaatgtcatttactgtcaacagtctgtaacagatactaaggtcaagataattctcaattatattctttacagaatacttcattaattctgtagccttttcatggatctgtatcagttaagagtttttgggtggccttccctcccccaccccaggttttaaaaaaatcaagtgtaatttgcatacagtaaaatgcatggatttatgtgtagtttgaattttagcaagtgtacaactacgctaaagttccctgggtctttcctgtcatcccactaccccaagcatctgctgtctggtttctgtcactatagattagttttacctgctcttgaacttgatgcatatggaatcataaaacaaactcttgtgtctgtctccttttgtgtatcagtacttcattcctttgttactgctgagcggtgttcccttgtatgaatatatgcggtctatccattgtcttattgatgtacatttgggttgctttcagtttttagcttttataaagctgcagaaatattcatctgcaaatctttttgtagacacacatactaatttgccttagatatatacttaggagtagaatgtctgggtcatagggaaagcctgagtaactttgtaagaaactgctcaattttgccagtgtctacataccattttacattccattagcaatgtatgaattctaattgcactacatcttctccaacaattggtgttgtcatttctaattttagccattttaatgggtgtgaagtggtatttcattgtggttttaatttgcatttccctgatactgaatgcttttttcatgggcttataggccattcctgtatctgcttttgtgaaatgtattcaaaacttttgccctggttcccatttttaaaacttcaatatgtaccttacaatgagaacacagggacacagggagggaaacatcacccactggggcctgtctgggggttgggggcaaggggagggaaagcattaggacaaatacctaatgcatgtggggcttaaaacctagatgacgggttgatgggtgcagcaaaccaccatgccacatgtatacacgttctgcacatatatcccagaacttaaagttaaaaaaaaaaaaagtgccttaatcccttccacaccattttctttaaataaacaacaacagtgcaattggcatgacaatgcattttaaatctctctgagaagttgttttctaaagaaagaattacttattaatatgttgagtggcctagaattgtgaatgtcctaaataatgttaggaaggatttgaaatatcattggagataaaatattatgaataattttgcttccgataaggcaattatgtattcaaaatactcattgaagtaagtcttggccaggcgtggtggcttatgcttgtaatcccagcactttgggaggccgaggcaggtggatcacctgaggtcaggagttcgagaccagcctgaccaacacggtgaaaccctgcctctactaaaaagacaaaaaaattggccaggcattgtggaacgcacctgtaatcccagctacttgggaggctgaggcaggagaattgcttgaacctgggaggcagaggttgcagtgagccaagattgtgccactgcactacagcctgggtgacaaagcgggactccgtcacaaaaaataaataaataaaataaagtctgttttattaattgccaagaaatttgaaatgatatagacacttacttatcttttttcccctttgaaatgcttatttagatggaaaaattagaatgtaacctatcagagttcttggcttatcctagaagaatatcttatctgctgaaagtgaatgctttcttcctctgtgccttctcttctctgggtcaggagtctgactttcttgactatgatccaaatgttttagggcatattagtgataccatatgtaatctaattctttgtaccatactgctggaaacggacctgagccaatctggtcatccacaccccttaggactttttgataggttacagtcacaaccaaaaagacttgaggtagatggagtttagctgcttccccacaacactgctaccaagttataataaaagctagcctcagatgaaaaagtctgccactcaacagtcgttcattcaatgcatatttattagcaagcaggcacaaaacagatgattcgtcctgtcctgaaagcttagctcttgcattttgtgggtactctgaccccttttatgaaaagcttacttgaagcacaggtatagggtttgtcatgcttatagttggttccagtcaatcagaaatcctcacaaccgccaggcgcggtggctcatgcctgtaatcccaacactttgggaggccgaggcaggcggatcacgaggtcaggagatcgagaccatcctggctaacatgctgaaaccccgtctctactaaaaatacaaaaaattagctgggcatggtggtagacgcctgtagtcccagctacttggaaggctgaggcaggagaatggtgtgaacccgggaggcggagcttgcagggagcctagatcgcgccactgcactccagcctgggcgacagagcgagactccgtctcaaaaaaaaataaaaataaaaaataagaaatcctcacaaccaggccagggcccttggctcacgcttgtagtcccagcactttgggaggctgaggcgggcagatcacttgaggtcgggatttccagaccagcctgaccaatatgtgaaacccggtttctactaaaaatgcaaaaactagccaggcgtggtggtgcgcacctgtagtcccagctactcttgagactgaggcaggagaatcgcttgaacccggaaggtggaggttgcagtaagccgagatcacaccattgcactccagcctgggctacagagtgagacttagtctcaataataataataataataataataataataataataataataaataaatacaaccagtagccggagggtggcgccggtttacgcatccagactgacatttcaaacactatccctgaagacagtctcgttagattcctcttatctgttcatgcaaatgtggggtgtatccataaaatattttagacaaatctgcatatgtggatagtcactaatttcaccaatgagagcccatttcttacagggattattctgatgaacatgccactaattttaccaataaaaatatttttgatgcccagtatttgaattataaattttccagaggtatgcgtaacagaagagctactgtattatttctggaatgtgactccctgctttaataatggccatccgtctctggagtgtaagtttctgattagagcaactgccaccagatctgcccgatcggctccctgttgtagcttaaaccaatcatatatgttttatccttgtccctgcagttaaagtaaataaacaacccaggcccattatataaaattagtaagaggaattcatctggatagtccattctctatcctgatcaatttaattagtaaatctggtaaaagtctcagatgagagtttaattatacagcatccagtgacacaggaaactaaggtcttgaactctgattttgcttttgtgttgtttgaaatgtttgttcctcagtgccataaagaaatagcacttgaacatacatttaatttttttagtaaggccttttttacttcctgcagaaagggtacactcgccagcagttttgtcacgaaagtacaccaaacaaaggagacagggtcatttataacttgacgcatccaccctactgctgtgtccagtttccattgactggaaccgtaccttacattctgtatttgtcccagttgactagcaacttagaactttttaaaagaggcagaggtagagtggaacaaaggaaggaggaagtaacttgtgaaatgctgagaaaggtaaaaacactttaaagaggaacaggctatgacctaatgcttgcttggaccagtataagcatgccagggcaaatatttaggctaaattgtgggagctaagaacataaagtatattgatttttttattatggttagcagatatttaagaatgttagcataggtctttggataaattttgcttctaagaaaagttactatttattcctaattggacggggaggaaagtctttgaagaggaacctctactttactttttacagtgtcacattgacagcatgtgggacgggggctggagaggttttttccagtgacttaagtttcagggccctttgtcgtaaaacaggaggagaagcagagagctagctgatggagccgtcccttggttctcaccatgaagcgcactgggagtcagctttgtgtctccagcccagggctgcaggggataaactaggataaggaaggatgatgatgaaaggcaactagctggagttgttatcgcatctttccatttcagagcactagctaccaatgctgtatttaaccttatatctgtgctgggacggtggatcttgtcctggcaggaaatagctgttgtttgaccacactgaacagggatgcagaggacaccaaggttaagggggacataactgtgaaagatgaaaggcttcctcctcatccttccctcactccccagaggaatatattttcacttatggactaacaccaacacgttcaaacccacctaatactcaaaaagtaaatacttccttccctgcccccaaatccttgataaccactgtaactctttacagtggccatctccttggtaaccactgtaactctttgggaggggcatttttctgttgtctttttttaattttttaatttttaaattaattttttaaatttaattaatttaattaattaatttaatttttttagagacgaggtctctatcgcccaggctggagtgcagtactgcaatcataacacactgtggcctcaacctcctgggctcaagtgatcctcctgcctcagcctcccaagtagctgggactataggcatgagccgctgtgtctggccctctgtttatctttattttagaagattatttatttattttcttctttgtgcttcattggatacaaatctgttaattttgtttttcttttttgagacagagtctccctcttattgcccaggctggagtgcagtggtgcaatcgcagctcacctcaacctccacctcctgggttcaagcgattctcctgcctcagcctcctgagtagctgggattacaggcgcgcgccaccatgcctggctaatttttgtatttttagtagagacagggtttcactatgttggtcaggctggtcttgaactccagaccttgtgatccacccgcctctgcctcccgaagtgctgggatgacaggcatgagccaccgcaccgagcttaaatctgtttatttttatacatataaatttaccttagaaataaggcttagttttgatttattctgtttacatatatcatgcaattaggttttttaaatacttagttgatctttgtatgactgtggaaagattacatattgatctactttattaactttaagtgatagtatgattgccatggtttaattattcccatattaatgacaattatttccatttagtcttactgcagacactgctatagtgaacacctgtccattgcttcttagtactcctatgccagtatttctctcgggtcgatttcaatagagggattggctgggttaccggttacatgcataacagatactgccagattgccctccagaacgcccccatcaatttacagtccaccttctttgtataaaagtagcaatctagccgggcgcagtggctcgcgcctgtaatcccagcactttcagaggccgaggtgggcagatcacctgaggtggggaattcaagacaagcctgattaacatggagaaaccccatctctactaaaaacacaaaattagccgggcgtggtggtgcatgcttgtaatcccagctactcgggaggctgaggcaggagaatcgcttgaacctgggaggcggaggttgcggtgagctgagattgggccattgcactccaacctgggcaaaaaaaagagcgaaactccgtctcaaaaaaaaaaaaaagtggcactctccccacaacctttccctaggattgctatcagtattttaatttttttccaactggatggcatgaaatgaaatttcattattttgtaattttcatttttctaattactaattaggccaaatatgtcacatggattttggtcatctgtatttatttttctggtttgcctttttaatatatgattattttcatcggactgtgtgtaattttaagattttcatagaaatagttttttatttatatatagtccttgttatataagctacaaatagtttctcctagtcaattgctttaaaaaaaaaacttttagagttacagaaaagataaaaatagtagagcattcctctgtccgcctcacagtttcacttttctctagtgttgtcatctgtcttcgtcatctagggctgctgtgacagaatacgctatgcatagtctgcgtggtgtagacaacagaaatgtattttgttacaattctggagcttaggaaggccaagaacaaggagccagcggggttggcttctgctgaggcctctgtccttggcttgcagactgccgccttctccctgtacctccacgtgacctttcctgtgtgcattcagtgggagagagtgctctggtatctccctttttttttttttttgagacagagtcttgctctgtcacccaggctggagtgcattgcgtgattttggctcactgcaagctccgcctcccgggttcaggccgttctcctgcctcagcctcctgagtagctgggattacaggcactcgccatcatgcaggctaattttttgtatttttggtagagacggggtttcactgtgttagccaggatggtcttaatctcttgaccttgtgatctacccgccttggcttcccaaagtgctgggattacaggcgtgagccactgcgcctggcctgtatctctcatcttataaggatatcagtcccacctgtatgacctcatttaaccttgatttcttccttaaaggccctattccctgtagtcacgttgggggtcaaggcttcaacataagaattttagggacacaattcagtccataacatcatcttacattactgtggcactttaagaaaccaacactgggctgggtgcggtggctcatgcctgtaatcccagcactttgggaggccaaggcgggaggatcacctgaagtcaagagttcgagaccagcctggccaacatggtgaaaccctgtctctactaaaaatagaaaaattagccgggcttggtggcacatgcctgtaatcccagctacttgggaggctgaggcaggagaatcactggaaccaggaggcagaggttgcagtgagccgagatcgcggcattgcactccagcctgggcaacagagtgagactccgtctcaaagaaaagaaaaagaaaccaatactgatgtgttattattaattatactgcagactttattgggatttcaccagctttcccattaacctttctctattctgaaattcaatccacattgcatttagttgtcatctgcctagtcacctaaggtctgtgaaagtttctcagtctttccttgtttttcatgatcttgacagttttgaggagaatgggtcagctattttgtagaatgtgcctcaaattgggtatgtctgcttgtgcttgttttcctcatgactagactggatttttggcatgaataccacagaaggtgaagtgcccttctatcacatcttgtcagaggtacatgaaatccacacgacatcacgggttagtcacgagcatttggttaaaatagtgtttgctaagtttttcttctgtaaagttactatttttccctttccacactgtattcttcgaaacaagtcacctaagtccagtccacactcaaaggggactaaggaggggttaagcatcacttcttggagagaagtagctacatgtgtataatttggaattgttctatgaggaagatttgtctcctctccatttacttactcaatcacttatttatgacagtatggattcatgcatattactttacactttggattaaaatccaatattatatacttacgttgttgctcaaattgttctttatttgactattgcagtttttcaggttggctccagtatcacactcttctcccacccccttttcttaaaagatatttttatagtgtgttctgtaaatttggttttcaaatctacataaatggaatcatgctgtatttactctgtttttcttccagcttctttcactaaatgtttgtgagcattgtttgtgatgtgtgtggctgtagcctcaggcactctcattgccatataatattccattgtaagtaagttcccatttgggctgttttcagtgtttgcctattataaataatgattctatgagcttttaaaaaatacctttcttggtgaacatatgtatgaatttctgttgtatgtaaatctagaactggaattactaagtcagaagatgtgctatgtttattttttgtatgtaaatactgtcagctttctaaaatggttgtactgccgctgtaatcttaaatgctgcaggatagagggagagttcggtggggtcttggcaccatggattagtggtctggcctgggagtggcattctcacctctgttcacttaaccacaaagcagtcagcacaagcagtcccaccatggcctgggatgtggagagccagaattattatgttcaactttttaatccagaaataattaattttttttgaaaaatggtgtgatagagggagacatttttaggcaaatcattttcttcagatttttgtttgactacattccgtagatttaaataagaattcttactgacattaatttatgttgagttttcttttaatgtcccattattgcaagttatttagaaatgggttttaagtgtttccatattgatagattgatagatttttttatgatcttttcatcaaaacttttttttttttttttgagatggagtctcgctctgtcacccaggctggagtgcagtggtgtgatctctgctcactgcaacttacacctcccaggttcaagcaattctcctgcctcagactcccgagaaaccgggattacaggcacatgccaccacgccggctcattttatatttttagtagagatggggttttaccatgttggccaggctggtctcgaactcctgacctctagtgatccacccacctcggcctcccaaagtgttgggattacaagcgtgagccactgtgccccgccaaaacatttcttttattgtattgtagtcattgaacatggtctatgtgtatggtttctgctttccagaatttgttgagatctccttgtgacctaacacatgacaactgaataccctatttgaaaagtttttgtgttctatattgaaaacagttctatctattgggtcatgccactaattccttatttcatttttttgaagtgtgtttagtcttctatgattatggatgtactaattactcctattttcacttgtttttgcttgatagatttaaaatctgttatgtgtgatggttataatttttttggtaaattatatcttttttttttttttttttttgagatggagtctcgctctgtcgccctggctggagtgcagtggcttgatctcagctccctgcagtctctgcatcctgggttcaagcaattctcctgcctcagcttcctgagtatctgggattacaggtacccatggccaccgtgccagctaatttttgtatttttagtagagaaggggttttgtgatgttggtcaggctggtctcaaactcctgacctcaagtgatccacctgcctcagcctcccaaagtgctgggattacaggcatgagcgaccttgcctggtgattatatatctttaaacattaaacacctttgtcttttaattgctttttattgtgaattctttttttttgagatggagtttttgctctgttgcacaggctggagtgcagtggcatgatctcggctcactgcaacctccgtctcctgggttcaagcaattcttctgcctcaccctccccaagtagctgggattacaggtgcccgccaccatgcccagcttaatttttttgtttttagtatttagacgaggtttcaccatgttggccaggctggtctcaaactcttgacctcaggtgatccacccgcctcagcctcccaaagtgctgggattacaggcgcgagccgccaagcccagcctgtgaattctgttttatctgatgttaatattgctactttcttttttcctagcaactgcatagcatacctttgtctatcctttcatttcagttttttctgtaaggctttgtttttattgtctttattaaacatatagcttgaggactttttggggttttttggtttgtttttgatagagatggtatctcactttcttgtccaggttggtcttgaactcctgcattcaggggatcctcttgccttagcctcccaaaatgctgggattatgtgagcccagcctagcttgaattttttaaactcattttgaaaatcttgtcttttaacaggtgattttttttgcattttaaaattataactcatatgtttggacttattcccaccatcttattctgttttgtttgccttaatatatcttcttgctattgggtggcttgctcaattttcttagtgtcattttctctcttgctgtagtgatttggaaagtatgaaaacttatatagttcttctagtgcctcccttaaaaaaagaacttacaaagtatttcagagatacaaatgagtatggagactaacaatgttgggggagatgtccagggcttctgtagataagattacttttttctaccttagttccagaccagctgattgagaaacacaggagtcaaacagacaaagattaaaattaccaggcttggtttatctgtgtgggcatttagatccgaaggcaactggaattacttgcgcaagcagccactggcacatcggacaaccacaaggacagattctagacagtgtgtctgcaaatgggtagagccttcaacaccccggatccatgggtgattgtgtagaatagtgcctcctccaccctcttatctccggaggacatgtagcaccggcaagaaataaacatccgttgtaaatcacatcactaagatttcagggttatttgttgtcacagcttattctgacgaataaactcaattcatcatagggtatagagtgaaccagaaccatcctaattgtaggtttggtcagtctgaaaaagaggagcaggaaggatagttaggcttcttcatcttgtgcatttcttatctcactctgtgctcacgtatttattggggtgttagcttttttctctttgatgtatggtgctttgtaaattctaaatactgacactttattggttttatacattgtgtctatcttctcctattctgtgagttatctttttaaattttgtttctgggctcctgtgttaaacagaaacattaaatcttttttttttttttttttttttgtgagaccgagtttcgctcttgttgcccaggctggagtgcaatggcgcaatctcggctcccagctaatttttgtattgaaacactaaatctttatgtaatcaagtttctcaatcttttgctttacagtttgggtcttttttgttttgagtaaaaaagaaatccatccctgtttcactaatatgagttattttcctatatattcttataaaacttttaaagcttttcttcttatatctaggtttttaatccacttgaggtatttttttgtctttggtgtgtagtggtgtatggtatgagatagggatcaaatttcttccctcccccacacccaaaaacatggacaacaagttgtcccacgtgtattgaatattcttctcccattgatttgtaatgtccctaatgtcatatgagatgttttcatttatatgtggctctcatctttgcctattatatctgtgccaatagtacactgtgccaatactgcctaaattcttctaagttttaatatgtgatagaacaggagcccccttcttggtctttttttttttttgagatggagtctcactctgtcacccaagctggagttcagtggtgcgatctcggcgtactgccagctccgcctcccgggttcacaccattttcctgcctcagcctcccgagtagctggggctacgggtgcccgccaccatgcccggctaagtttttgtatttttagtagagacagggtttcaccacgttagccaggatggtctccatctcctgacctcgtgatccgcccacctcggcctcccaaagtgctgggattacaggcatgagccactgcacccggccttcttgttttttttcacaatgttttttgttcttcttggtcctgtgatcttctggattaatttacatgtattaacatgtcatattccatgtaatttattacatgtaacatgtaaatttattacatttaattcatacatcagcatgcaatttacatgtattagcatgtcaggtttcatgtagtttattacatgtaacatgtaaatttattacatttaattcctttattagcatgtaatttacatgtattaacatgtcaggtttcatgaaaagacctgttgagattttgattcgaattgcatttcttttgagggaaattactatctttatgatattgagtcttcctgttgataaacctgctttatttctccatttatccataagggatatgcacatcttttttttttctattacatttcgtaattgcttattacaagtagatagaaaagctattggtttttgtgtattaatcttctgtatctagaaacattgcaaaactttattatttatttgagtagtttatctgccgattctcatctgtattttttttgttttgttttgagacagtcttacttggtcacccaggctggagttgagtggcatgatctgggctcacggcaacctctgcttgccaggttcaagtgattctcctgcctcagcctcccaagtagctgggattacaggcgcgggccacccatacccagctaattttttgtatttttagtagagatgctgtttcaccattttggtagtgctggtcttgaactcctgacctcaggtgatccacccgcctcggcctcccaaagtgctgggattacaggcataagccaccacgcctggcttcgtgtctgtattttttagtagacagtcatctgcaaacaaggacagttttgattcttcctttccagttttctctgatttcctttctgtatcttgatatcagctagcacttccacttactacattgttaaaaagaggtaatgatagtgggaattttttcttgctttttattttataaggatgcttccaaagttaaggcataaagtgtgatattggctgttggaacagtctttatcagcttaaggaagttctcttttagctccattgtgcaaagacttaattggaaatgagtgttgattttaatgacttccttctctgtttttaatgagataatcgtgtgactttttcctgtaatctgttcatgttgataggcttttttttatgttgaataagattaattttcttttcatatgctattgaccatttgtatttcttttctgaattgagtgttcatagccttcctagattttttatctcttaggttgtgttagggaaaaactcaaactgtttttcctctgctgtcacatcaacacagcaattatcaacacaaaagacctctgtaatatgtgtggatttctgtggcagacaccagttgggtgtcctcctattcaattctgacaccatctacctggagatagcaggttgagggctcagtccccaagaccaccccctccttcccacaagtcacaagtccgggcctcagcaacttctgactgactggcttcaagttggggttcccggtatcccctgtttgggttcaattaatttgctggaggaatcggggaaactcacttactagtttattatgaaggctattttaaaggatacagataaacagccacaggaagagatgcgcagggtgaggtctggaagggtcccaaatgcaggagcttctgacaccgtggagttggggtgcaccaccctccgggcatgtggatgagttctcactcaccatcctgtcagcctccgtggttcagctctccaggagccctctgaaccctgtcctttgggcctctagtggagatttcattgcttgtccatgactgaaggatggacaagtgtgttgaaatatgattggacaaaaagggtataatctacacccagcaaggcctgtctgttcagattcttccagcctctctgggcagcattccttcctccagggtatggggtgggatgctttgtggaatgagggtcttacagctcacagtcatattagagccctgccttgggttggggaaaggagagcaggaaaacatcaaagagactctgtttcccaaggccggctttctgaggtccacagcgcccagcatataacaagatgttgtaacaaaacttatgggagttgggagctaggaactgtggatgaaaaccaataagtatataattataatatcacagattgtgatattgctttggagagacattttatctgttgtgataattaacttttattataggtcttttcccccaagtctctcctagtttttccctttgtgacttgttttttgtcacactttaaaattctgtgtgttaaattataaaattattcattatagcccaggcgaggtggctcacccctgtaatcccaaaactctgggaggccgaggcgggcggatcacgaggtcaggagattgagaccatcctggccaacatgatgaaaccccatctgtactaaaaatacaaaaattagccaggtgtggtggcacacgcctgtagtcccagctactcgggaggctgaggcaggagaatcgcttgaacccaggaagcagaggttgcagtgagctgagattgcgccactgcactccagcctgacaacagagcgagactccgtctcaaaaaaaaaaaaaaatttttttttcgttataattttatagttgtctgacagctttttcaaaatcatttcatctgtgttttataaatatgtgatattagcatctcattttcttttcatatatgttaacacctgccgtatattggataaggccttctttgttactgaattgaaataatcagttttcttgtaagtgttcatatatctctgggtccagattgtacgttgctgtgctaaaatcctattgttttaattactgttgatttatatttgggcaagtctttgaggctgggacttaatcttacgcttcagatccaatagcctgtgttcaaatcccaattctgccacttcccagcagctttgtgaccttgtgcaggttagtcactccacctccttagagctagttgaccctggtagtgctaacctcacagggtataatgagctgaatacaatacgcgacactaaactctccatcatcgttggttatcattgtcatttgagtgggtaatgctgctgccgcttctttgttaatcagtactttgatgaacagttcttcctctgctccccgtgttctttcctaccctcaaaaaacaagtggctaatacagatgacagcctgatgtctatggtcctgtctctgagggacaatctgttcaggtggagcctgttctctcctgctccctagcatgtaaaatctcctttctgcctgtctgtggtgaactcagcagaggttgacttcccctagctgtagggaagctgtccatttctccattggctctgccaggacctgtgaaggccatacacccagttcaagggggaaatacaaagtgtctctaggtccaaatagggttcttcaaatctttcctattaacaagcacatacggtattataattcccaccgactcctacatatttctatgttttatggttaattatccccaaatacctatagctgttatccaggaaaatgtttttcatttcaaatttaacagatatttgctaaaggaagaggtagtcaacctggaggcccaaaagtcaaatcagacctacagacaaattaggcccaaggatggattttaaatatttttattaacatttttaaatcatgagattttgtttctttctcctatatcatgttactcaaagaagaagtagtgatgatgtggtgcgacagggatgtataggcaaaaagatgactgctgctttctgtttctgacaacagaaacatcaatggggggatacatggatttttaacaggattataaagttaatcgtcaagctttaagcaaactttgtaaagagccctgtttcggccaggcgcggtggctcatgcctacaatcccagcacattgggaggccgaggcggtggatcacttgaggtcaggagtttgacatctttactaaaaattagctgggagtggcggcatgtgactgtaatcccagctacttgggaggctgaggcaggagaatcgcttgagcctgggaggtggaggttgcagtgagccaagactgcaccactgcactccagcctgggcaacagagcgagactccatcaaaaagaaaaaaagaagagccctgtttctggttccaggttcctaataaatggccctcaacccagcaccatagtctctgtagtactttattgatgtgttactctaacaataaaatattggcattatgtagagataattgcacatcagaaatcagtgatttcccccgacctgtaatatataaaatactccttaaggaattgaacttaaggtttgggctgggagggaaaatttcttcccatttccatctagctacttttctagtttcaattgggttttttgaaagaaactggaatttcaagagataggtagaacccaaaacttgttactaaccagttcccttgtttaaatgcatacgaaggatattttccaggttgcctcatactgtgctcattatatgcttcctatcttgatcaagagtcggctttggaaaaacactgttagcctgcaagttgactttttagaagcagtgtaattttgaataggtaatacatcgtacaatgcaaaagctgtaaaaaggcataaatctctcttattccctatttctagacaccgactatgaaggcattgatacgtttcttgtggctgcttccacagacttgctacctacgatttcatccacaatcgtatacatgtgtatataggatttaaactcacacatagaagtggtagcgcttaacagtccatcttggctatctttagttttcagttttcttttttttttttcttttgagatggaatttcatacttgttgcccaggctggagtgcaaaggcgtgatcttggctcactgcaacctccacctcccgggttcaaacgattctcctgtctcagcctcccaagtagctgggattacaggcatgcaccaccacgactggctaactttttgtatttttagtagagtcagggtttcaccatgttggccaggctagtctcgaactcctgacctcagatgatccatcctcctcggcctcccaaaatgctgtgattacaggcatgagccgccacgtctgtctagttttcagttttcagtcttaaacatttctcccaaacttcccatttgttggctccatggaggtggcccagtttatattcccacccacaggtgacggatgtgagtgctctcaacctcccgacacactgcagcaccttatccaactctcttgagttttgccagtctgaggaaaaaatagtacctcatagtggaactttgcatttctgttacttttgtgataacaaattgaggttaggtatcttctcaatgaatttaacatatttttccagtttatctcttgatttcgtttatgtatcttttgccatgaaaactacttaaaaatgtgtttatggcttttagattttgtatcatttagcaaggtcttccccagttggagagtataaaaaagaattcatggtttaaaaaatgtattttaaaaagtctttgatccatctggaattgtagaataagattaggaggtatgcaggtttacttttgaggcaaaagtatgtataaagtaacacttttctatagaaaacttgggaaaatacaggagggaatgaaaatgaaccccaatcccagcaccttcttatctataacaactgagatcatgcttatgctgggatttcaatttttttcacttgagattaaaatacaaacataggtttagaatatattttaatttatttaatgtttttatgggtacaagtaggtatatatatttatggggtacgtgagatgttttgatacaggcaggcaatgcacaataatcacatcatggagaatggggtatccatccccttaagcatttatcctttatgttacagacactccggttgtactcttttagttatttttaaatgtacaattaagctattgtggactgtagtcacccacaccctattgtgctgtgaaataataagtcttatttatttgtactatttttttgtgcccattacccccacactacctttcccagcctccgataaccatccttctactctctatctctacaataattttaaatggttgtttaaaaagggtgtcaacatttttgtttttaaaccatcccaaaccgtccctttaaaggaatgcatgaccagagggttgcctttaaatcttgcacaattaaaagcgttttctctgaggcagctgatctcaggaaatcttgcacgattttgaagatgcccgtttcccataagacccggccctgcgggggcacttggcgggtcttggcagagctaaggggctgggccctgctccgggagggcgcactgcaggggcccgggcctggcgcggctgcagcacctcctggcagcaggagtgcggcgggggaggcgccaggaggcccctgccccggctgccatcaccctcgggtctgtccctggcctggggcagagcccttttgctcgaagtcctttaatcgctaaggagctttcccagactcttccctctgcaggcccgctggcctctgacgcatgtcccctctgcggagcgtttgggcactggaggagccctggttggcacaggccgccccgcgttcccagctggggaaggaaggcgggcggccaggcggggggaaagaaagcgggaggtggggcggggtgctgtccgtccccacggcctcgtcgcgcgcggggctttttccaggacttggggacttccggggttgcgctgtcgtgtcaggccgttgggccgccgaggggtgtcgctgcgcccgctgccccgcgcggccctttaaactttgttttttaaacttcgggggtgtggtcgcggcgcctcccctctcggcggctggcagtccttgcctctgccccgccttccagatgctttggagtcatgagccgggagggcgcgggggcagctttggtagccgaggtgatcaaaggtgagccgggagggcgggggcttcccctgggggctccggcacccgcgctgggacagggcgggcagtgctggcttggaggtgcccctagtctgggccccggccgcccttgtctcctgcgtgtgggtggcctcggcacttgtccccaggctctgggctacagcgctcatgggcggctgtgacccttgcgtgcctgcacctgagcctagtaggtgagctgcacctccccgcccgcgggagcgagatccttgggctctgtcacagggatcaaaggtccttgtggttggaaaggattaagccctgtcacccatttgagtgtttgtggttgcaagaagttttagctgaggagtttacaaggaaataaacgcagtaattgcatgagttgaattgcagatcaaaaaaaaaaaaaaaatagtttaccatttggggaaagggtgccagctggctctgctgaaagtatatatattttaaaggctgtgcttgattttgccacgttgtgagtgtaagtattttcttagcaccactagtattactattagatattgtggatgactttatttcacccgaggatttttaggcaaggaatgcgggtggagcctcctgagccttactactcattaccattcttgctaacctcacagcagcctaactgcatttatgcaacacaagttcatctcagacccatcatgcagaaacctctcattgcttctgttttaatggtaatttgtctaattgtaaaaataccgaagtagtgattccaagttagaaagtagtgatccctaagaacagttggagaaacatatggtttgttctatagctgtaagcggtaattttgaagcaattttgaaagcattctttccctttaagaaaaaaatagtttcttactgaaatgactttttaggatgtcttgaaaaacgtagtgaaattcatctagaaacttacaaggttgatgctagccatcacatgcatgctgcaatttgctgaaatgtcttgatccaggggagctaaacttttacaaaaataggtttgtttagaagtcatatcactacatgaaaaatcaccacttttgaaacttacggttaaaggcagtttctcttttaaaaatgtgctcattgattattcccacccaaatagccagaatattttgtaattacccattaccactcctaccatctgaaacgtgcatgaaaaaaatgaaaaattgacttcatctgaaaagagttgtgtcatgatatatgaaacgttttttgtaacctccaggaaggaacattgcaatttttccatttcagatcgcctttgttttgccattctctacagcagaccaaagagtgcatcaaatgtacattatttcagcatagataatgaacttgaatatgagaagtaagtattgctctttaaaagattttaactttttgtttttgaagaatctaaaggtatggttataaatgggatggcctgggaaaattataaatctattgattgctaattacaggatgcttgtttttcacctgtagtaataaaataaacctttagagcaaaaaaaaaaaaacctccctaaatttaaacatttagatttgctagtctaatatttacactacaatgagatataaatgtgtactaagtaagatattgtggttttgcccttggaaatatgtgtggaaaaacagcttttttaatttagaaggtatgttcatgttcattgaggttacatgtaggcattatagcacttgtggcatttttaagtaggcattatttaccagaatagtcttccaccagtaaaacagtacctttaagttgtattggcccataacaatttggtatatgcttgcttatcttaatttgatcttgtagacccaaaaaaggcatttatattcagagcatctagaatgtacatcacatttttatttttcatttttaaagcttctacgcagattttggaccactcaatctggcaatggtttacagatattgttgcaagatcaataagaaattaaaggtaaagtctttaagatttgacttaagtaatcattgttagcttgatctgggggacgaaagtaaggaaaacatctctttttaaaaaggaaatgacatgtttttcactgcagtggtgtttgggacatgcacatggttttcttgttttataagatcatagtgtatctatttgttttctagagttttgaatgaacagtttaagtttgggtcgtttggttctagtttgaattagtgatgcccaaatacttgaaaagccaaagtgggaatcagttaattaagtgaacctcgtattgtctgacctaatagaactgaaacttaacaagagaaactcttcccttgctgtggccattgttctttctgccttcattttgatggggagtgatagcaaactaacaagaaagctggactcatcttactttctctcctattttgaaactcccatgatactgtactacatgatcctttatacatacgattaaggggcgtgagaatctagggcaaataagcatgtcattaaggctgtattactgagagttacacaagtatatttgtattggtttgaacttagaccacattcatgtatgtaaaacactgaattgttggccatgcacggtaggaagttatgtatgtactgcttactagcagttccaaatcagtcactgtaaattctcaactggaaaatactgctttttgggacaggcacttaaaaaaaaaatttaattgaatacagagaggaaataaaatttatttttaattagaattttaacatgctttaattaaaaattcatgggtaaggcagatgtttttccttgaccatgaaagctatattgctacagagctggagactcttcttttttgcctttcttaaataggaatataactatttatggccttgtgcatttgagttccccctcctttttccagttgccagtggcagatcttttgtttcatgcaggactaggaagctaaaaataattctctcttcctccaacatttgttcctttgctttaattttggaaaaaaatttttttcctgtactcaaccatctgtggacttttagtctttgggtcaaccaaaaatgtatcagtcctttttttcttcttccttttttttttttttttttttcccgtgagacagagtttcgctcttgttgcccaggctggagtgcagtggagcaatctgggctcactataacctccacccccctggttcaagtgattctcctgcctcagcctcccaagtagctgggattacaggcatgtgccaccacgcccagctagttttgtatttttagtagagacggagtttctccatgttggtcaggctggtctcgaactcctgactttgtgatccatccgcctcagcctcctaaagtactgagattacaggcgtgagccaccgcacccaccagaaaactttttaacatataaatagaaatatgtacacatcatggatgtagagctcaataaactttcactaatggaatatacatagatgattatcttgatcaccagtcaggagcagtgcactggcggcaccccatagcagccctccatgctgtcttccagttcctgtctctgcacacccctcccctggttattcactgccctggcttataacactgtagatgattctgtatacctttttattttaacttaaaggctttggggacagatttctttaaaaaccaaacagaaggaaaggtggtcttttctaccactcttggtttgctctttcagaagcagcccatgctttaagcatgtgtccattcatgtcccctcccctcttctctaattgtatgttcattctcatcccagaatgtgcctttttatgggaagatatatggtatttgtgggtatcaatgttaatcttttcaaaggtcttgctaataatatgaatggttatgggatttggaattgatcttcatcacaaaatgaaattgtggaagacttgaaattaaaaagaaaatgctaacagttatttatttttatgcagtccattacaatgttaaggaagaaaattgttcattttactggctctgatcagagaaaacaagcaaatgctgccttccttgttggatgctacatggtaagtatttgttttcctaatgtattcataaaaatgcacacaacagtggttctttacatttgcagttggaattttgaaatcaagataatgtcttgatttctcttcagaaagaacgtgttttgcttttaaaaaattgaccaattcaaggaagctgtgcttatgtggaagtagcaggtagatgagagatctcctgtaccttccacttaattttgctgtgaacctaaaactgctcgggaaaaaagcctatatttttttaaaaagtgcccaactactttggcaaaggtttatgttttatggcactaaaggttggaaaatagtgctccaaagctatttctattcactcgtgatccatttagtgagttgtaaaatcatcttactggggtcaggaccccactattaattttctaaaaatttttttaaaaagtgctttctaaaatttgaatctaggcatttttcccctaattaaggtcatctcctttctcatcaaaacatctagcaggaggccacgggatgtcagtgttgtcagaagatgggttacataccacacggattacatacatatgccatcaagtgctccatttggatcattggaaatgtgctttggaatagcagtatttacataagagttgtgaatttcatttatttgtaaatatgatggaaaagatttattttttgaagagtcacattttgtttggcacccagtggatttgtctgcaggggccctgaaagctgcaatttttccagagccagcttagagctcctccagagtactaccccctgtgtctggtggtgagaaagctggccacgctgttcagtggggagtagccaggggatgtttcttccacccccaccccaccatcagtgtaatagttattctctctgagacttgaaaaaaagggttgttttggccgggcgcagtggcttacgcctgtaatcccagcactttgggaggctgaggcgggcagatcatgaggtcaggagatcgagaccatcctggttaacatggtgaaaccctgtctctactaaaaaaaaaaaaaatacaaaaaatgagccgggcgtggtggcgggcgcctgtagtcccagctacttgggaggctgagggaagagaacgtcgtgaacccgggaggtggagcttgcagtgagcggagatcgcgccactgcactccagcctgggcgacagagcgagactccgtctcaaaaaagaaaaacagggttgtttttggagctctttaggttctttcttccccacttctagcttgctccttatctctggcatgccttaccggaccattttaaaattattttctggagtatagtttgataatctggaatttacaaagactagtccaaaagttggtgatattagttgaaatcgtacctcaagatttaataattttcttttttatgtataaggtatatcattaacagcagtggttaaggtctttgttttgttttcctatttatgctcacaaaagttgaattaaatgcttctgattgggaggccgaggcaggcagatcacttgaggtcaggtgtacgagaccagcctggccaacatggtgaaaccttgtttctactaaaaatacaaaaattagttgggcgtggtggcacatgcctgtagtcccagctactcgggaggctgaggcaggagaatcccttgaatccaggagttggaaattgccctgagctgagatcgtgccactgcactccagcctgggtgacagtgagtgagactttgtctccaaaagaaaaaaaaagtttctgagaaaacttcaaaatttattatcatccctgaaagtatgaaacataggttatagattgtctattaaaatttggtttcataagctttcccagacgtattggtgttttcctttctcccagcctctcttggtgtttctcgtacttgcagcaaaagccttaaaaaaaaaaaaaaaagtttgagtagtttggcaggcgtggtggcaggcgcctgtaatcccagcgacttgggagaatgaggcagggaattgcttgaacctgggtggcagaggttacaatgagccgagatcgcaccacagcactccagcctgggcaacagaatgagaccccgtctcaaaaaaaaaaaaaaaaaagaaagagaaaagtctatgtatgaacccaagaaagaaaaagagtatggagaagtgggtgttttaactgggacatttggtcctattacttggccagtcactggggagaggaacctcatagattaacataaatcatgacaactttatagaaaaaggaattcagccagaattcttgagattcataaaatattaaagggaaccctggagaaatggtccttggtgtgacagaaaaaagttccaaccgttctttgtggatcttgcctttacactgacctggacaaagtctggatggctgaagttccatctaggagagagtgctcctgagcagaactccaaagcagaggggccagaccgggccacttccgggtcaattgctgtctctggtcagatgagatgtccctgagatggtagggtcttgaggagccaggcacgaggactacagcgtgaagaacctctctgaaggtggctatgggcatagtgggaactcagtcagggttgtcttaaaaacagaaacagaatgtgtgataagtttataaataagaaatcactctttttaagtcttgttgctgtcgtttttaaactactagtgaacaaacaacaaccccttgacgtatgtattgaaaattttttggcatatttgtttccagttttatattggccttttgactttgtttatggttgtattttggaccacagaagcttatttttctatagttaatatatcttagatttagaaatccttccagaatttcacaccttcaggttagtactgatttgattggttagggaagtgccaggtaagcaaatttggatcttcactcgcatttattacttacccagtgaggagctagcttggcaggaggattatagctcttggctgtgacagaagcctttgcagccatagctggctgctaaaataggaattgggagctgtaatgttgataggcaggaaagcaggagaaaagcttctaagaaaaggaaatgtattcatagtagaaaagcagtgtcaagatataatatggacacctgaaaagataacacatcaaagcaagtgaagctttgatctggttaaaatacgttaaatcctctggttaaagatttgtggagatgagtgctagttccctataaactgatccgcatccttgataacgttttctggagtcgtcaggaattttggagagagtaaggttctttagtgttcgacttggcatggtaatgttaaaacaaaaccaaaaaaatctggaggaagaatctttaggaaagaaatattccaaatagactgactctgtttatttttatcagtcctttttgaattcagggcttctgaaagtaacgtgtttccttcatccttgtatacacagaaagacctaatgtgggttgggcagagagtgtgaggtaatcctttatggcatggaaataaagtgttatatttattttttatcttaaaaacagaagaggtgaggcttcaaaaatgtgtaaaatatgaattgacatgcccacaattggtctttttgacagatggtcaggcgtcatgtgtgttacaagaagtgagaagagtgagttgagtactcatttgtctttattgtatttcaaagtattgctcttcatgtggcctggtaaatggctttcccattcagctatctgaatggtagactctttggtatcaaattagagtgaagctaaaaatcttttgcaccactgtaagagttgaaaaatataaaagatgacttgagcttttgtttgtttgcttattcacaaaaaggtaaacatactatattgttttacaaaataagtttgctgccctatttaagccagtggctatgacctggccagattgagggataatgatacttaacctgtcatttcaaagtaaaggtgaaattttaagtggaaaattttaagtgcttttcaaaacaaattcataataaaaatccttttggaaagaaaagttggaaattttgttttgttaattttgttgtaaaaatgtcatacacaaaatccatatttgcactcttgagaaatttaaaaaatcttttaaaaagaagtttttatatttctagaaacaagacgtgcacgtgtgtgtatatgcacagatgtatgttgtgtacgtatatgttttatgtttacagtacaattttaaaattttttattggtacataattgtacatatttatgggttacatgtgatagttttatacatgtatataatgtgtgacagccaaattagggcagttgcagtatccatcgcctcaaacatttgtcatttctttgtgttgagagcattttaaatcttcctttctattttgaaatacacagtaagttattgtaaactatagtcacactactgtgctatctaacactagaacttgttcattctaactgtacatttgtaccaaagaaccaacctctcttcactccccctgaccacacacgcccttcccagcctctgataacccttattctactcttggcctccataagatcaacttacttagctcctgcatatgagtgagaacataatggtatttgtctttcaactttggttacatcttcctgccacagcagttagattttctgaagatacatggtattcatctcttctatgggttaaatgtacttttgagggctagcctgggaaattaaccaccatttctaacatctttctgtgtataaaataaatgccaagcattttgtgtaaaaaataaatgacacaagcaaacttttggcacgtagcttgcaaatttgctttcctctaatgtttaatagattactttggtagagctaattgtaacatgtaggttccctgttcaaaatttatcactgtatattattattttttatgtttaagcagtttttatagctgtaagaatggcttaccttgtaagcatttatgttgaaaatgatgatactaattaaatttaagagtatattaactcagcaatctgtgagaagaattctaaactgcattaaatttgagattgcctctacagttatgataagagctcagggactttgttatttaatgatgatcttttgaatctgtggtcccactttttaaatgatttaattatcttggactcagaatagccagtgcctgcaggaggaaaggatcagttgggaagttaagacaagggaacagagaacgaggatctagacgcagtgggtaagaatccagttcagcaaacagctgcccagatgggacagcagaggctggaggacagaatgaggtcataacacccttcctgggtgtctgtgaaaggcagggcaaacagcacgaggcaaccgtcagtagtagccaggccccagctagtgtgaggcgaactgggctgagcaaagggacggcacaggccctcagtgggaagccagtgcttccttgggagccggccctgtgggaggcagctgtctgccctgctcacagtgcatcacagtttgacttcccttgccacccgagggcttctgacgggcgtttccactgcccgtggtgcttgctgggtgctgttaacttggggaaaaagtgaagagaaatggctctctgatagcttaagatccttgactgcagatccgttaagctttctggaattttgggtcccatccttgttccggtcattgttttagataggatgggttcctgtctataaatacggccagaggagcaggccctcttccatcaataataggcggtgtgatcttggatgagcagttgatgccaaggtctggaaagttgtagcctgccagttttatgaaactcacagagcattataaatagttgtgggttttttttcctctgtggttaaaatttaggagatttcattttttaaaaaatcaagatttttttcttggtctttaaaaaatgtccctaccactcaaatgtgtactaattcccagggccaattcactatttttattagcagacttggtagatacgtgtttgctactctgaacttccagtttcattttgtcgaaattgaggatcattatatatatcattatatatatgtaaaagtaattttaaaagttaaaactattgaaatataagttcatctgaggttttttttaacgagttttttttcttaaccagttttgtgcaggagctatgaaagtgattttatttacttttttattctctgtgttctttcctctgctcaccttttttattgagcagttgaatgtgtaagcctatcttcaacttgcattgatttgtgagcattctttgttaatctggagagagtgatttttttttttaataatcaatcaagttcttggcgtaggaaagactgtatcatctggctgacatgaaaatagtcacaagagtctttaagtgctggaaacattgtgacatctctccaggatttcctggttactcaggctgccacatttgttgctggaatttcaatatcctttgtcactctcagctctagggtgaaatgacttgtgtaacgtttgggttctaaattgtacagaggctctctaagtatataaataaagcttcagaatcctgtgcataagagtagaaataggaagcacatgtctaattgggtttccatgatttgaggcccggcttgtcagcattgaaacattgaaaggagaagtaatgcagctgggatcctgttgcttctgttgcttgttcttccatcactgctagttcaatacctccgaggttttgaaacgtatgttagtaatcgagggtccagcgttctcacagggactctggcatgcagatggtgattttagaaagtgggggtggtgggaagtcctgggaatggttgaggtattgttcagcaaaaaaagaactttgtgccatgactttgaaaaccacaccagtctcaagcattttcaaccacagtatttgcgtgtgtttgtgtgatatttgctcgttcagagagagtctttatcctagagaaacaaggtcttactgatgcctcctaagctgcatctctgtgcttacgcctcatgtatttgtctattcacttttaacaaatggaaacggccatttccttaaattgagtgtgctactgcacactattgctgcccagcaaattactgcaaaactttgtgacctaaaacaacagtacgaattgtcttagaccatgtctatgagttaggcatctgggagttgcttaacttggttgggtctggtctggttctgtaccgtgtctgggctgcattcacctggagggtccatgtctaagggggctcagtcacatacctggcaggttagtgccgattgctggcaggaggcctctcttccataccacgtgggctgcttgagtatcctcccaaaataacagcttgctgtacccagagcgagggttctaagagaaagcatgacaggagctacctcttttatgatctagcctctgaaatcacaccctattactccagtatcctgttcgttacacaggggcaccctgttcaccgtgggaggggaccacacaagggtggaaatgccagcagatgagactctttggggttgcctgggaagctggcgatcacagctggtcagcagctctcttggtcatcatttgttgtttcctgttcttaactagcactgtggaattagagtgggcattctatatatatagcttctcatgaaaatatatcaaaagaatttgagaaacgccaagtgtccagactgccagaagcacggtgatagatcataagttgcatcaatttagagtttactaatctgagaatttgtgttaatgtaggagttatttataggattcttctttagtaacaaatttagaatgatttcatttgggaaggccttttgaatcagcaagatgagtaggtgtaaaagtaaaagttacttccttcatgcctggccaaaaaagaaaaaaaggtaaaagttatagattggcaaatatatctttgatagttatataagtggatttgttctgcatctgtaaacttccttcagtttatctagttatgctttacattatttatttatgtgccagcattccccaactggatttttaaattacagtcttttaaagttcatcgtcaggaatttaggggttttttcccccataggaaaaaaatgttacattgttcttgtggttttttgaatcaaactagtgttccaaggctaaaccacagtccttaatgtattacagactatttttgctttgaaagttaggagaaagtaataccattgcaattttactaattaaagaacccaaagaactgtaatcacaagcaggaaaaattatcttaaattagtgcttaaggaaaaatttgtataatttgagagaaggccttagaaatttagagaaattcctaaatgggtctctagatttcattttagtacacagatgaatcagactctattcttatttttattggcttcaaggtgtttttttatttggttttgttttttggttttagggttttgttttgtttttttgtttttgccttttgagactgactcttggtctgtcgcccatgctggagtgcagtggcgcgatctcggctcactgcaacctccgcctcctgggttcaagggattctcctgccttagcctcctgagtggctggggttacaggagcctgccaccatgcagggtaattttttgtatttttagtagagacggggtttcaccgtgttagccaggatggtctccatctcctgacctcgtgatctgcctgtgatggcctcccaaagtcctgggattacaggcgtgagccaccgcacccttccggttttaggttttgttttttgtttttttttaatctgctaggaagtcttaaaatagaatggagaaaatgaaagactttactgatgttatctggtaagtgttagaagaggcatacatgcatcggagactggaagggaataagggaatttggaaaaaacaggctgatttttttaaatgttttaattttcatgacttataggttgatgcttagaagatctgtgtgtaggccggacatggtggctcatgtctgtaatcccagcactttgggaggccgaggcaggcggatcacctgaagtcaggagtttgagaccagcctggcaaacatggtgaaaccccatctctactaaaaatacaaaaaaactagccaggcgtggtggtgcacgcctatagttccagctactcgggaggttgaggcaggagaattgcttgaacctgggaggtggaggttacagtgagctgagatcacaccattgcactccagcctaggcgacaagagtgaaactccatctcaaaaaaaaaaaaaaagaaaagaaaagaaagaaacagaaacaggccagtcattgggaaaattttccgtttatgagtcttgagtcagaaaattggtgaaatgccctttggaagctgagtcagtgcttatgactagttttaggatatgtctgtttctgagtttctaagatccttgctggatctttgaactttgaaaaatttctcttagtccagtgatagtttcacattgatatcaacttttattaaacatttaaaattttcctaactattgtaagtagatttgggttcagctaagtacatcagtgaatcggattggtgtgtaatgaaaccataagacatgggtcccaacttcagaatgcttcacatttggttgtggaaacaggtcacatgtatcatgttaagtaatggagataaaaagtttgcaattaactttttttagtgatttctttttttttattagtgaaatttaaaatctatttccccaaagtaatctttggagttcaacctaattttagtgataatatatgtgccagatttaatgctgtttctccttcccaccgctcccgcctccccaaccccaaccttccgtacattagttgaaagggccctgcaggaaggttctgaagtcccaggcaaatgtaatagggggtaggcagaggacttacttagagagatggtggtgaaagtctcaaactgcagatttctagaacaaacaggttacttgtaagaagcagacagagatacttagatcagtaaaatacttctgtaacactagaagtgagaagacatgagaacgttatctagaaactatcaagaggaaatgactgcagaccaaaaatcctacgcatagtagtcaaataaaaaatgtcaagggaaaaaaaaaatgtttggaaaggcaaggaataccaactatagacctcaaatgctgaagaatatacttgaggtattctcccaggttaaagtcaaagcatagcatagttctaaggacaaaagaagtcaatgagcgtcgaaaacaagtgcagtttgataatcaacttgttcagtattgcaagccctcacacctacatggacagagttaatcacagtctgtgttctgcctttgtgtctctttccacctcaccccagtctaaccccatccccatctcctacacgctgcttagctgtcatttcagtggactttcaggaaggaggggaggtaaaagcatgggatcagtctaacgtcttgatttggaaaatctgtttttaaaatactgtgcttcttaccacaaaaggttgctgtgaagagttgttggtcagggcttatactgcaaacaacagaaaccagcaatggaggatttaaacaaaaaagaaatctatggacaggattctgggtgattcctaggctcctggggaaggctggagaaccctgctcagttggttggaaattggacaaaatttacttcgcagtgacagcactgtatcttcacttagaaataaattgcctttttcttcttttttcaaacataggttatatatttggggagaaccccagaagaagcatatagaatattaatctttggagagacatcctatattcctttcaggtaaatataagaatgatgtggtagattcaggtaatcagatccttgccagaaatatcttgatagttgtttctgaaaaaagaagatctggtaaatagtcattttaggatgagcgcaaataacaccacagatctgggtttttccacagtgacactgttgacgttttgtcatggaggctatcttgtgcgtcgtagcatgtttagtggcctccgtggcttctgcccactagatgctggtaaaatccccacacccactctaattgtcaaaactcagaatgtcttcagacattgccatatatccctgtaagtgaccttgggggatggagagcaaaatctccctacgctgagaactactgccattgatgaaaactaagctttggctgggcacagtggctcatgcctgtaatcccagcatattggaatgccaaggtggaatgattgcgtgagcccaggagttccagaccagcctcggcaacaaagacagaccccatctctataaaaaaattttaaaaaaaattagccaggcgtggttgcacatgcctgtagtcccagctacttgggagactgaggctggaggattgtttgagcctaggagttcgagggtgcagtgagtgagctatggtcataccacagcactcaagcctgggcaatagagagataacttgtctcaaaaaaaaaaaaaaaaaaaaaaaaaaagcaaaccccaaaacctaggctttgtatcaggtgagaatcctgggttattgtactcaaaactaccactgaggagtgtggttcctgagaagttaagaaacgttcccaataatcagtagttactttctgggaccaaaatgaaccccttttttctggggacacagtcagtagagacagtcgataaggttgctaatgcagtaccacttccagaaaaaccagtcaagtcactgtgttccagaggtggtagttagtgatgtctacaggaatggatgacatcatctcaaacttagcatgcgattgtgttgaagatatttctagaagactagtgcttaaatcaagttctaaaaatttttctgctcgtttatcaaaatacttgacttagctctatagtttaaatacttgtatggtacttaatgggtaataaatgtatgaaataattttactcattgaagactttgatattttcaaaaactgcttgttcttccattcacaaattaataataactattgcttattagttcattgttcaaactaattagttcgttagtttatcgtattaggattgttacataaaccacaaatgcctgattttgaatgtatggccctaactttaaaaaagggagtttgtgaatctgactttattgtagatgagccttgggatgggtatttctaattattggcagaatctccctttcaaataactttataggcctgcctgtggacttactccatgaaataacaatttgtcagggcagtctgaagacttcagtaatacgctgcatgaaaaattgtgaaaatctgtgattgagcaaattagaattggcttgaacccagtatcatccctttctgctagctcatggctcatcttaagtattcttttatttgaggtgggtaggaagggaagagggggaaataaagatcattttctaagctggaaaattcttctcaacctataacataatagcaaccacattcttcctttaaaagaaatgcttgtatttttggtcttgagtcacaggcaccttggtcatctcttgatgtagtgacatttgttctatagaactcttctttataatggtaatcttttgtgatgccactcttagatttacagcacaaggtcctgaaataggaacatgctcacacatttcgcactgtgcaatgaaggatccatggaacactgttgatgtgaaaaaagacgttttgagttaatttaaatacaggtgccaaaaacagaataagcattgcttactgccttgctatgtttcaaattattaaagtttggcactgagaaatgaagttagttccttttggtcccaggagcatcagtcagtaattctccaaaaggcaagacttagctagaaaccattcagctttgtggaatttgaatctcttctattgtagatactaggtatttgatttatctaaacagtgtttctttctttttttttttttagacggagtcttgctctgtcgctaagctggagtgcagtggtgcaatctggactcactgcaacctctgcctcccaagttcaagcgattcttctgcctcagcctcccgagtagctaggactacaggcgtgtgccaccacgcctggctaatttttgtatttttagtagagaatggggtttcaccatgttggccaggatgtcttgatctcttgacctcatgatccgcccgcctcagcctcccaaagtgctgggatttcataaagtgtggcctgtgaactggtgccgatctgtgacattttgttaccagcctgtgttgagataaatacagaagttgagaataagattttagaaacatttatagttatcgaatagagcaattttatgtctgtagaatcaaatagtagaagaaatttgagcttgtattttgttttttttcccctttcatttttctagtaatttattttattcacaaaaataagattattgcattactggatatgtaatagtatagtactattgcatttcatatttatcttacaaaagtgtcaacctgtgatagacttagtttttaaatttagtgcttcttcacatagtgttctatagaacttatcaattagaaagtagtccaatcagaattaataaagcctgataatattttgatagaaatgacattatattctttgtatcttgccactttaagtacatagaataaatatgaccaacaaagtattgctaacacgacgttgtgcaagaatggcattcatttatagcaaataagttcttttatgttctgtagcaatgttttatttaattagatttaattcaacttagatagaattctctctctctcttttttttttttttaaagacagattcttgctctgtcacccaggctggagttcagtggcgcaatcttggctcactgcaacctctgcctcccaggttcagggaattctcatgtctcagcctctagagcagatgccaccatgcccggctaatttttgtatttttagtagagatggggtttcactaagttgcccaggctggtctcaaccccctggcctgaagtgatccgcctaccttggcctcccaaagtgctgggattacaggggtgagccactgtgcccagccttctttaaccactgagttttaaagtgtgtgtgtatgtatgtgtgtgtgtatgtgtgtatatgatttcttattgagttatattaaatatttctctgtgtctggtctgcataattaaatagtataaaatatagtttaattttttttaaatatcataggatcattgttatgaacagtgtgtatttctgttctctggtattatctgttataatactctttgcttcttagttgtttttgtgtgtgtggggcttgcctctgcttcctgttttcttgagaggtagtattgtatatttgttaatagcttgacttgacatcagacagatgggagtcttgctgtcagctctgctactgacatctctgtggtcctttacagatttgagccttggtctcctagtctttaaacagaaacaataggctgggcgctgtggctcacgcctgtaatcctagcactttgggaggctgaggtgggcagatcacaaggtcaggagatcgagaccatcctggctaacacggtgaaaccccgtctctactaaaaatacaaaaaattagccaggcgtggtggcgggcgcctatagtcccagctactcaggaggctgaggcaggagaatgctgtgaacccgggaggcagagcttgcattgagctgagatggtgccactgcactccagcctgggcaacagagcgaggctccatctcaaaaaaaaaacagaaacagaaacaataatacattctctctcaaggagttgtgaggatgaagtgacatcctgcatataaaacacttggtataggctgggcatggtggctcatgcctataattccagcacttcggaaggctgaggcaggaggatagcttgaggccaggatttggaagatcagccttgcagcatagcaagaccatttctctttggggaaaaaaaaattagctgggcagggtggcatgtgtctgtagtcctagctacttgggagactaaggcaggaggatccctcaagcctaggaggcttcagtgagctttcattatgccactgcactcagcctgcacaacagaacaagaccgtatctttttttttttttttaagacagactctcgctctgtcacccaggctggagtgcattggtgtgatctcggctcactgcagcctccacctcctgggttcaagcgattctcctgcctcagcctcctgagtagctgggattacaggtgcccgccaccacacctggctaattttttgtatttttagtagagatggggttttgccatgttggccaggctggtcttgaactcccgacctcaggtgatccaccagcctcggcttcccagagtgctggaattacaggcatgagccactgtgcctggccaagaccctgtctcttaaaaaaaaaacaaacacttgatatagtacctggcctttaactaatatttgttaaatattccaaccttcccccttttaagttgactgtcatttagctacttttttttgagtcggagtcttgctctgtcgcccaggctggagtgcagtggcacgatcttggctcacggcaagctccgcctcctgggttcacgccattctcctgcctcagcctcccaagtagctgggactacaggcgcctgccaccacgcccagctaattttttgtatttttagtagagacggggtttcactgtgttagccaggatggtctcaatctcctgacctcatgatcctcccgcctcaggttcccaaagtgctgggattacaggcatgagccaccgagcccggccatttacctacatgtttaaaaatcactgtcgtggccgggcgcggtggctcacgcctgtaatcctgccactttgggaggctgaggcaagtggatcacctgaggtcaggagttcaagatgagcctggccaacgtggtaaaaccctgtctctactaaaaatacaaaaattagcagggcatggtggtgcacacctgtaatcccagctacttgggaggctgaggcacgagaatcacttcaacctgagaggcggagattgcagtgagctgagatcgtgtcattgcactccagcctgggcgacaagagcgaaactccgtccccaccccactccccgcaaaaaaaaaaaaaaattctctgtctcctagatttccctcccacccctttccagtcagtcatcacccccagctaatcattgctctgacttctaccactatcagttttgcttgcctttgaacttgatattactggtatgcattttggggagctgtcaactggatttcacatatgtaatgtctatgagatttacctgtgttgtggaaggtatcagtagttcatccttttttattccttttgtagcattccagtctatgagtataccacaatttatttgcctgtggtccttttgatggatatttgggtcattcgtagtttttggccgtggtgaatacgagctgttacgaaagctgccattctttaaaactagtatttgacattgttgtgcagtttctaagcagtgcccatttattgattcttacgtgttttccaaatttgttaaatgatcttggtgacaaggatccctccccactgcccaaggcttataaactgagcctcagagttgctgttctgcctattggaagaaggctgaatgcaaggtgggaggaagatgtgatgtgggtgtgtctaaaattggaggtgctaatgaaatacacttgagtgagcaaagattcttgtcgtatattcagattctatgatgtatgaggcaggacttcagcagggcccagatgaaagcgtgtgaaatcatcacagattggagcggggctgtgccccacagtaggttctcaaaaaaaaaaaaaaagcattgaagaaatttgccaaaatgtcacagagactgaatcaacatgtctttaacttgattggaaaagattatcagtaggttaagaagataatcaagccaggcgcagtggctcacgcctataatcccagcactttggaaggccaaggtaggtggatcacgaggtcaggagattgagaccatcctggctaacacagtgaaactccatctctactgaaaatacaaaaaaattagctgggcgtggtggcaggcgcctgtagtcccagttatttgggaggctgaggcaggagaatgttgtgaacccaggaggtggagcttacagtgagccaagatcgcgccactgcactcactccagggggagactgtcaaaaaaaaaaaaaaaaaagaaaataatcatactccttcacagagaagacatggttaaaatcattgggatccaacttgagggtttaccccatttccattgataattttgatttgatttaggctaaagtacttcattttcctgccttagtttctctacctaaatgggttctttattccatgaacaccctatttctacaaaaccaggatttgtgttgatttgtaggttggtgattcataaacttgaacacaatcacagacaactagaggacctgttaagacacaaattacctggccctatcccgagaactttgattcagtagatgtggggtagccctgagaatttgcatttctaacaggtggggtggtcctggtgctgctggcctggggaccactgctggaagtccttttgtttttttctttctgaatattgccaataaagtgttggtaaaatcgtggccttttaggttaaagactttttctaggatgtggaagagaagtttttcacttcagaaccttacagaacaaaaatggtgtgttctaagaccttgtgttggctgaacgcagtggctcacacctgtaatcccagcactttgggaggctgaggcaggcagagtgcttgagctcaggagttcgagaccagcctgggcaacatggtgaaaccccaactctaccaaaaaatacgaaaacttagccaggcctggtggtgtgcacctttggtcccagctactccagaggctgaggtgggaggatcgctttagcccaggaggtcaaggctgcagtgagccatgattgcaccactgcactccagcctgggcaacatagtgagaccgtgtctcaaaaaaagaaaacaagaccctgcattctgtcctcatgaaggttcgcatagctcagtaattctaagcagctcagtcagtaacattgaagacgattttagctaaaaaggatgccttttcttgccctcattgctgtagttttggcccttaaggtttgagcaagaattaaaagtttaaaatgtggtttagtttttattctaacatttgtggaatattcattttccccttttaagttaatgtataacttatagtttttaacaaaaacactaatctttttttattttattttatttttttgagatgggagtctcgctctgtcaccaggctggagtgcagtggcgtgcgatcttggctcattgcaacctctgcctcccaggttcaagtgattctccttcctcagcctcccgggtagctgggactacaggtgcgcgccaccatgcccggctaatttttatgtttttagtagagacagggtttcaccatgttggccaggatggtctcaatctcttgacctcgtgatccacctgcctcggcctcccaaagtgctgggattacaggcgtgagccaccacgcccggcctcaaaaacactaatcttaagtgtacagtagtaaggttttacatgtatttatgtaactaccacacagtaagaaatattacagtgtgaagacccaaataaggtggggaattagtgatagctccaccagcaaccctgtttccccaggagcaaatgagtaccattcagataggcacagtttttctgcatgcctagcttaatcataattaaattaatttttatgttgcctaattccagaagatttcatcttgtaatggctcaaggtagccaaaaaggagaagcagggtaggggtcggggtgccttatttctctgggtaaaaccttacttgatattaagagatttgtataggaagatttactggtatgtattgatgcagtgtttggctggagttgtctgtaaagtaatataagcactttcccaaaactagagtgatcctgtggaaggtagttgacttgttagttcctgtggttttattggtattactgtcctttaaaaatcagaaagaaggtagggcacagctgtttacacctgtaatctcaacacttcgggaggccaaaaaggtgagaagactgcttgaggctagaagttttttttttttttgagacgagtctcgagtctcgctctgtcacccaggctggagtgcaatggcgcaagctccgctcactgcaagctccgcctccgggttcacgccattctcctgcctcagcctcggagtagctgggactacaggtgccccccaccacgcccggctcatttttcgtatttttagtagagacagggtttcaccgtgttagccaggaagatctcgatctcctcaccttgtgatccacttgcctcggcctcgcaaagtggtgggattacaggcgttagccactgtgcccagccagttgtgtgggtgttttgggcttgttgttttttgttttttgttttttgagatagagtctcactttgtcgcccaggctggagtgcagtggcatgatctcggctcactgcaacctccatctctcttgttcaagcaattctctgccttagcctcctgagtagctgggattacaggcgcccaccaccgtgcctggctaatttttgtatttttagtagagacagggtttcatcatcttagccaggctggtcttgaactcctgacctcgtgatccacctgcctcggcctccctaagtgctgggattacatgcctgagccactgcgcccggcagaggccgggagtttaagaccagccttggtatcataatgagactccatctctaccttaaaaaaaaaaaaaaaagttagctagatgcggtgatacatgcctgtggtccttgctactggggacactgaggtgggaggatcacttaaacccaggagtttgaggctgcagtgagctgcactgcaccccaacatgggcaacagggcaagacgttatctctataaaaaagtttaaaaaaaaaacccagaagttacccagttaaatgggtaaaagtctttaggataacgatagcaacaaaatgcttatgaccttctacctaatattttaaatgtgaccttgatttctcagtatttctgtcatacttggttggagacacacacacacagacagacacacgtataaatagacacacatacacacatatgtttattacaggatcaaaaagcagtctttcccagtaagattttcatacggtattttccagtttaaagaaaaaattcaaatgctttgcccctttgggggagagataggtattgatttgttgaattcaagaaggtggctcagctgttaaagccaaaaataatccagagagaacatttgaaatttaggaagtggtcattattgatccaggcccataaaacagtacctattggaataggtagaaactgcagtgaaatttgtaattgatttatcttttatttaaaagtcaaaaggcgagatttttttcttcttgataatggttcagagtgtacatttgattttaaattctagtcacctttgtcttaggtaagtgtaattgcagaaaattaactgatctacattttattactcttgggtttcagagatgctgcctatggaagttgcaatttctacattacacttcttgactgttttcatgcagtaaagaaggtgagtgacatgtaggatgcacccagtgttgtgttgaggaactaacatgcggtccaagaaaactaggccttcttcccgagatctttttgttagtgtttcttccaagatgcctatggtgacagaggtgctccatttcccaactaatgtcagaatgagaccaaaccaggaaacagtttattctgaatttctgagtgcttctatgtatgagttgggggaaaagtcacttaagaaacagggaaaataagagttatacgattaggttctagatccagaattggttttgagtatattatgatctaaaagaacaaaagtaaagatgacttgtttactggtaagttctctttgatttgtatattctatatacctgattcctgccaataccattacaacagacgtaacacagtcactgtcaaacacttcatttttgttttgtcaggcgttcaatttctagttcaacagaatttgaatgcctcaattagtttgttatacagttttatgtgaaactaagtgggtcactgctgctttgtcaaactatttccaagtgattccttgggtcataaccagggctgctgtgttgattccaggggacaccctccctatcacgttctacgtgaacagggtcccctggggtcacacagtgcagcaagtcctggtattaatgtcaggacagcaggagaaactagaatggtaaatcagtagcccatggatcaaataagcctttgacagcatttttctgtaacttgtgcttttagagccaaaaggaacccaggtttactttcttgtataatgaaacatggtggcttgctgggaattgtgacagacatgtcttaaaacgagaggactaatcagcatacaaattcagagactaattgatatacttttttccctgtatcaatcaatgaggtatgggcacattgtttggatttgagcccagtgactgtgggatatggagctgattggggtagttgccatgagctctgaggcggctccatgggccctcagtgtgggcaggtatggggcactggtggaaatcaggagaccaaagggcaacaggtgtaaatggtaccttctggttgcagttgcagcccctgccaggtgggctcatgcaggcaggcacactcacctttaaaaagagaaaagtaaagctttgaggggtttggaaatgatctattataacaccatatggcagcttctattattattttttggcttttttttttttaattgggtattgcacccaaagtcaattagctggtacgataggtcaaagattgccatttgcatactatattttgggtttttttaaaattaaattttcattttttctgctatgctcagctaatttttatattttttgtggagatgaggtctcactatgttgcctaggctggtctcaaactcctgagctcaagcgatccactcaccttggcctcccaaagtgctgggattacaggcgtgcaccaccgcacccagccactatatttagttttatttaagggtcactatcttctgatttgcagtgtaagcattttttatttgtgactgattttgaatattgcatatatgaagaaacatgcatcaatgtaattatgttttcagtgtgattcacttccaataagatcacctcatgaaattcaaaggaaaataggaattccttataaactacttttttttattgtttcattctattagaaatagctgtagtccaaaatcatgaaatatattgcagtcaaggaaataaattttgtgattgacttagtcttgggattagtgtttaaataactatataaaatgaagacctttttagttgatattctagccttcttattttacatttgtatttcagtagtttacttttgaaaactgggtgtacaaaagccccctctttgaaccaagaataccttgtggatcagcaattcttgcttccctcctgtttggctcagggatcagcagccaggaggatatttctcagaggctgctaggtctgtttgtccttgtctcagaaaatagacactctgcttattttggttatcatactctgcctgctatcacacagagtaaggctataggataggacagaaattttttttgttttattcctatggaaagaatatcttttttttcctcaaaagttttgattttagtgttgatgtcagagctgtttactttagggaacattgattaaagactgttcggaagaatttgaaaatgaagatatggatgaagtatgagggttttgtttgggataaactagcacatggattctctcctctttcttatcgatgtagagaccattgggttgtgcattatatttgaatcctaaacttctgaattttcagccaggggtggtagtgatctggtaagagaagaggattactttcagggcgtgattatttaacaatacatggataggatgactggtgaatgaaaataaaaaagcacatctcacaaacaaaatccaaacaaaacacaacaaacttattacatatagttataattaatttccatataaaagaagcacttagaagacgccgcccacttcctttgaaagctgttcagtggaaagtaatctgatcatgacaatactttcttggggggcccctgatatttagtattctgaaattggataggaaactgttttcttatttgcatccttgttcttaaaagctttcttttggattttaggcaatgcagtatggcttccttaatttcaactcatttaaccttgatgaatatgaacactatgaagtaagtcttcaaggatcatgttttcaactcttcctccccccgcccagctttattgaggggaataattgacaaataaaacttatatatacttaagatgtacaaagtaatgttttgatatatgtatacaccatgaaatgattacctaatcaagctaattaacatattcatcacctcacataatttagtcttttggcgtgtgtgatgagaatacctgagatgtactctagcagatttcaagcatacagtacacacattagatctccagaatttacttatcctctgatggtttgtactctgaccaaaatttctctgcctgtttttaatttttctttttttaaattgaaaaaaaaagagagagaccaagtctcgctctgttacctaggctgaagtgcagtggtatacatggctcactgcagccttgaacttctgggattaaatgatcctctctcttcagcctcccaagtagctggaatcacaggtatgtaccaccatgccaggctaattttttaatttttatttttgtagagatggggtttcactttgttgcccaggctagagttgaactcctggcctcaagcacttctcccaccttggcctcccaaagtgctaggatcacagatgtgtgccactgtgcacggccctgtttttagctttcttaatcacccatttcacttacagaagcaatattcttgttttgttttagacgtgtatagagtgaaaaaaagtcaagtcttcatcttcttatccctatttctcctgtcccaattctcagtgggaatttctgcatttgatgcacaattctagagtgaatgagtgtgccccgtgtgttctttatactgtttagtttaaatgtattttagtattgatggctgtcacacagtgattgagatgcttttaaaacccttagcatagaataagatgagatgaatagtcattatacacctaattatctctggaaaatatctttgtttttgccataaccttcggtttgtcaggacacttctggttgcaagttacagaaagtaaacacaaatagcttaaataaaaaaggaaaaatctgccaggcgcagtggctcatgcctgtaatcctagcactttgggaggcctagaggggcagattgcctgagctcaggagtttgagatcagcctgggcaacatggtgaaacctcatctctaaaatacaaaaagttagccaggcgtggtggtgggcgcctgtagtcccagctactcaggaggctgaggcaggagaatcacttgaacccgggaggcagaggttgccgtgagccaagatcaccccactgcactccagcctgggtgacagagcaagattctgtctcaaaaaaaagggaaaaatttactggattacataaattaaaagtccaggaataggattggcttctagcatgccccttcaggtgctcagacacttaatcagaaattggacttgaagttagttttattctcaggccagccttctccagtagtgataaagatggccaccagcaactttgacctgccagtttggcaaaatgatcagaaaagtgtaatcttagctccatcagaaggcccaggaatgcctctcactggcctgacttacgtcatgtgcccatctctgcaccagcctgtgttctttggcagggcagggctaaggaatactctggccagccttagttctctggccatcccaggagcctggggcatagggtcagccccatcaaaccagccggaccaaaaaaaaatttattttctaacagttttattttattttatttttctttctttcttttttagagacagggtctcactctgctgcccaggctggagtgcagtggtgcgatcttggctcactgcattctctctcccaggttcaagtgatcctcccacctcagcctcccagtaacggggactacaggcacgtgccaccatgcccagctaattttgtaatttttttgtagagatgggatttcgccatgtttcccagcctggtcacaaactcctgcactcaagggatctacctgcctcagtctcccaaagtgctgggattacagatgtaagccacggcacccaaccacacaaaatttcttaaaaacataggacagggccagggagagataagccaggcaaaaccacaggtgtgttctatgttttttaacatagtatatatattttaaaaagaataaataatttgattctacagctttatcctccaaatagggaatgagtaagatactgtgctaaagcccttttcagcccagagtagttgtagcctcctgtcttcttaccctgctgtagttaccttgagcagacttgctccccagcactggggagatgattcctcaaacagcagcacttcatgtggcagcatcttgaatcctcagagaattctttttcacaacgtccaaagtaaatattatttcaaactcttacgtttaactgaactgttttttcaatttcagttaataatgacactcagttgtttctgtgatgtaccaaagatgtaagaatacattgtaggattcattagggccaaccctgtctttacttctctgatagcagtccatttctaaagtacaacgtacatttaactagcaccttaaacttacagaatatagctaagttattaacaccttttttgcgcttgtccttaaaacattaaacatttgaaacaagttactttgtctatgtaagcaaaactgctaaaaacactagttggtatttgttccttttgtagtgatgcctttgtgtgctattaatgaataatataggcactaagtaactcccctgttactactgtagagattggagggtctgggctggggggtagcaggggcacaccacaaacgtcttcacctccatgaagctgtgtggtgacacagggaactgtttaggttcccacacaccagttcagttattatagtgtatttagaaatttggggatagtgtcattcattgattctacaatgcccattttttcctatttcagctcctctgaattcaggatgtatcttaattaatggcatcagcaattcagtgaaatctagttgttgccaacaactgatcacgggtttgttatttaaaagtccagatttctgatttcactttaaaatcagaatatctggcaacagctgccctcattcctgctttgacctttccttttctttttatttaaagagagagggtctcactgtgttgccctggctggactcaaattcctgggcttaagtgatccttctgcctcagcctcccaagtagctaggactacaggtgcatgccactgcacccggctgtttagacctttgtattatggaacatgggctgactgattccccatgttgatcattaagtccagtaaactggtttgggattacctgcttggtccctgtagatattcaagaaactctgttattttttactcatttttaggtacacgtagaaacaccccaatttcaaagctaatttatctgttgtttttaatcacgagtcctctccttctgcactatcaagtgtcttctacttcctgcttaagtctctgttgtccatttcattaagacagaagtttctattattgttaaatttgaactgtatctatgttataatagtaatggtaactcaatccaaaggacctaataacaggaagtaacatgtcttacatatcagtttatatttgtttttttgtagggacatactgtgatcttggtatacttgtaattttttagtttcctggtcggttcagtgcatttatttatttatttttttaatttttgttttttgagacagagtttcgctcttgttgcccaggctggagtgcaatggcacaatctcggctcactacaacttccgcctcctgggttcaagcaattctcctgcctcagcctcccgagtagctgggattacaggcatgcgccaccatgcctggctaattttgtagtttttagtagaggcaggatttctccatgttggtcaggctgatcacgaacaaatgaactttttaaattggttgccttattaaatagttaggaagatagtggaaagatatatctctgtaagtaggtaagtaagtaaatattgggaagccagaaacctaagtagatagtttttccccctttattcgtggagtcaagattgctcatgttggaagccagttagtcattcaggaaaacagggaagttcccagattccttatactggaaaagtttgcttgctttcttattaattagcagcaactataatgagaattgattcagataaaataaccaaatagtatatttgtatggcagcagtcagctctgtattccaagggctgataccctagcaatgaaacactgttaaaagaagatgattaggaacaggatatacgtccattccctagatatacttatagcagggcaaattgagattcctgtctcatggcaatttgtaaacagcttttccgctaaagcaaatgagtttgaagtccttcagagactcagtcttgagtagagaggttgtggggagaatacatttaaaaacgaattgtgctggtcttccccttgcagaaagcagaaaatggagatttaaattggataataccagaccgatttattgccttctgtggacctcattcaagagccagacttgaaagtggtatgtgaaattatggcattaatctcattttgttattgaaaatatctatcctatattttcttttgaaagagttacaccaagcttgaccaagtgttaattattatttaagcatacttggtcacttcagtagatcattctgactggattttaactttcttttcttttgttttttacagttataatcaaattggtatttaattcccagtccagatactgtttccgttcagttacaggtgaaactattagccattgttttctttatgtgttttataagatctggtgcatttctttatgtaggttaccaccaacattctcctgagacttatattcaatattttaagaatcacaatgttactaccattattcgtctgaataaaaggatgtatgatgccaaacgctttacggatgctggcttcgatcaccatgatcttttctttgcggatggcagcacccctactgatgccattgtcaaagaattcctagatatctgtgaaaatgctgagggtgccattgcagtacattgcaaaggtatgtttctaggggtggttaaagaatagtatacagtatgagtatatgaatatgtagaaacagaccatattcatttagtttatgtgtcagaacatgaaactgcctttatttttagagtgccgtgaaacctttgatttcagatgaaaagtatagtaacttattttcataagtaattctacaaatacatcacattgaaatgcatttatttattcatcaaatatttattgggtgcatcctatataattctaggatacatcaatgagtagcgtagactgtaagagcctgtcttaatggaaactatattcttaacaagttgctctgttttcagcaattgtaacagtgcctggcacttaatagatattttttgaataaatgaatgactatacaataataaatggtatgaagatagtaggatttatttaactctcttgttagttaattaagaaacaagaaatatagttttgttacaaaaatccaatattggaaaaaaagctcagcaagccttggggaaagggggagactgatctccagagttactgctgtatttgtagttttaaatataatggcaaaacatcacatttcagtttttattgaaaaattacatggcatacaaagaaacaggaaagtatagcctattcaaagggaagaaataaatccaggccgggcatggtggctcacgcctataatcccagcactttgggaggccatggcgggcggatcgcctgaggtcaggagtttgagaccagcctggccaaaatagtgaaaccctgtctctactaaaaatacaaaaaaattagctgggtgtggtgacggatacctgtaatcccagctactttggaggctgaggcacaaaaatcacttgaacccggaaggcagaggttgcaatgagctgagatcatgccactgcactccagcctggccaatagacagaacaaaaaaaagaagaagaaataaatccacagaagctatccctgagaaagatcaaattgtggacttagtaggcaaaaaattttaaataaccatcttaaagatacccaagagttaaaagaatatgtgggaaaagtcaaggaaacgatttatgaagaaatactaatatcagttataaaaagaacacataaaagggaaccaaaaggaaattctggaaatgtactaaaactgagatgaaaaattcactggagggattcaaaagcatatttgagcaggcagaagaatcagtgcgtgtgaagctagaatcattaaagaattagcaagtctgaggaacagaaagaataaagagcataacataaatgaacagaatttaagggatccctgagacacacccaagtagaccaagatacagatcgtgggagttccagagggagaagagaagtaaaggagcagacagatgatttggctgaaaactccccagatttgatatatgcaggaatatccaagaagctcaacaaactccaagcaggataaactcagaggcccatgtgaacatgcattataatcaagctataatgccacagacagtcttgaaagcagcaagagagaagtgacctaccacatacaggggataccactgagattgtcagcagatctctcatcagaaacattgcaggccagaaggcagtgggttgatatattcaaaatgcataagtgagggaaaacctgttaagaattctacatctggcaaaactccttcaaaaataatggaaaaattaagactttgcccaggcaatcagtttgcctttctgataaaggcaaatacatggaccattataaaagctagtattatcgtaacgagataatttgtaaaatattattactgtaacttgtaaatattgtaacttgcaaaaaacaaatagaaaatctgaatagacccctaactagtaaggggattaagtagtccaaagcctcctgacaaagcaaaaccttggatataataacatcgccagtaaattctaccaaacacttaaaagggagtttttaatcactagatctgacttgcaagaaactctaaagggggagtcttttaggttgaaatgaaggcacactagacagtaacacacagccatttgagaagaggaaataaagatttctgataaaggcaaatacaaggaccactataaaagctagttttattgtaacaagataatttgtaaaatattattactgtaacttgttattgtaacttgcaaatattataatatgtaaattattgtaatttgtaaaataatttgtcgtttgcaagtagtataatttttgtgtattattatatacaaaaattgcaagtagtatattattgtaatttataaaatagagagtagaaaaccaatagagaaaatgaacaaaaccaagggttggttctttaagaagaataacaaaaatgataaacctttagctagaatgatgaagtataaaaggaagaagactcaaattactaaaattagaaatgaaaatggcattaccactgatactacagaaataaagctgatcagtacgtaaaaatgatcagtattgtaggacaacaaattggatagtctacatgaaatggacaaattcctagaaaaacaaaacaccagaactaaatcataaagaaatagaaaatctgaacagacccctaactaataaggagattaagtaatccaaaacctcctgagaaagcaaaaccctggacatgatagcatcaccagtaaattctaccaaacacttaaaaaactaaaaccagtccttctcaaactcttctgaaaatttgaggaaaaaggaacactttctaactcaataaggtcagcattaccctgataccaaaaacaaaaagacactataagataactaactataggccagtatcccttacgaacatcgatgtgaaaaccttgaacaaaatactagccaatggaattcagcagcatatttaaaaggattgtgtgccatgaccaagtaggatttatcccatgattacaagagtggttcaacatatgaaaatcaatcagtgtgatataccacgttaaggacaaaaaccatacgatcatctctgcacaaaaagcgtctgacaaaagtcattacccttttgtgataaaaacacagtacaaactaggtatagaaggagattacctcaacataagaaccgtatgtgaaaagcccacagctaacatcatactcaatggtgaaagactgaaagcttttcctctaagctcatgaagaagacaaggaggcttggttttgtggcttctatttaacatggtaatggaagttctagccaaaggaagtaagcaaaaaaaaaaaaaatcgaaattagacagggggaagtaaaattatctttttgcagatgatatgacttatatgtattatagaaaaccctgggccaggtgcaatggctcttggctgtaatcctagcactttgggaggccgaggtgggtagattgcctgagctcagaagtttgagaccagcctgggcaacacggtgaaaccccgcctctactaaaataccaaaaaaaaaaaaaaaaaaaattagccgggcgtggcgcatgctaaggcaggagaattgcgtgaatctgggaggtggaggttgcagtgagctgagatctcgccactgcactccagcctgggggacagagcaagactctgtctccaaaaaaaaaaaaacagagagagaaccctcaagattacgcacacacacacagagcccctgctagaattaataaatgagttcagcaaagaagtagcagcatatacaatcaacaggcaaaaatcccttgtttctaagccctgacaataaaaatataaaaaagaaactaagaatacagtttcatttataatagcatcaagaagaatcaaatattggggaattaaccaaggagatgaaagatttgtataaaacatttttgaggaaaattaaagaagatgtaattaaatgtaatgacatcacatttgtgcactgggtgacttaatattgttaacatgtcagtattgcccgaagggatatacagattcaatgcaagcctgtcaaaatttcaacatttcttgcaaaaatagaaaaatgattctgaaattcatttggaatctcaagggatgccaaatggccaaaacaatcttgagaaagaataaaaaggttggaggactcacttcctggtttaaaacttcatacaggctgggcatggtagcttaacacctgtaatcccagtactttgggaggctgagacagaaggattgcttgagcccaggagtttaagaccaccctggacagcatggcaaaaccccatctctactaaaaaatacaaaaattaactgggtgtggtggtgtttacctgtagtcccagctactcgggaagcttagatagcaggatcccttgaacctgcgaggttgaggcggcagtgagccatgattgtgccattgcattccagcctgggtgacgtagtgagatcccgtctcaaaaaaaaaaaaaaaaaaaggcttagtacaaagctacatcaatcaagattgtgtggtactggcataaagacagatacatagaccagtgataggatagagagctcagaaataaatccttgtgtatatggtcaaatgacattcaagaaggatacagaaaccactcaatggggaaaggacagtcttttcaacaaatggtgctgggaaaacctgatatccacatgtaaaagaatgaaattgggcccttacataacaccatatacaaaaattaaaatggatcaaggacctaaatataggacttaaaactataaaactcttagaggaaaacagagggtgaaaacttcatgacattagatttggcagtaatatgacaccaaaggcactgacaatgaaagaacagacaaatcggactatataaaattttaaaacttttgtgcatcaaagtatactatcagcagagtaacaaggtaacccatggattgggagaaaatatttgcaaatcacttctgataagggattaacatccagaagatatagagaaaacgcctaaaaacaacaacaaaacccagttcataaatgggaagaggacttgaatacacctttctccaaagatataaaatggccagtgagcacaagtaaagttctcagcatttttgacttatagggaaagtcaaatcacaaccacagtgagataccactttatacccattgggatggctgttatctaaaagaacaaaaacatcaccaccagaaaattacaagtgtggagatgtggagaaaattagaagccttgtgtactgctagtgggagtataaaacaatgcagctgctatggaaaatggtgtggcagttcctgaaaaaattaacgtcattcagcagttccatctctggttatatgctcagaaacaattgacagcagggatatgaacagatatttttacacccatgttgtagcagcattcttcttcttcttctttttttttcttttttttgagatggactttcactctgtttcccagactagagtgctgtggtgcaatcttggctcactgcaacctctgccacctgggttcaagtgattctcctgcctcagcctccagagtagctgggatgacaggcacgcaccatgacatccagctaatttttgtatttttagtagaaacagggtttcaccatgttggccaggctggtctcgaactcctgacctcaagtagtccacccgccttggcctcccaaagttctgagattacaggtgtgagccaccacgcccggccagcagcattactctgaatagccaaaaggtggaagcaatccaggtttccatcagaggaaggctaaagaaatggctaaagaaaatgtgctatatcatacaacagaatattatgcatctttagaaatgaagaaaattctgacacatgtactgccacatggatgaaccttaaagatattaggccaatttaggtttgccagtcagaaaaggacagatattgtatgaatccagttgtatgagatacttggggtaagagaaagtagattggtggttgccagggcctgaggggaggcagggattggtagttattgtttaatgggtccagagttggctgggcacggtggctcacgcctgtaatcccagcactttgggaggctgaggtgggcggatcacgaggtcaggagatcaagaccatcctggctaacacggtgaaaccccatctctactaaaaatacaaagaattagccaggcttggtggtgggcgcctgtagtcccagttactcgggagtctgaggcaggagaagggcgtgaacccgggaggtggagcttgcggtgagctgagattgcgccattgcactccggcctgggcgacagagcaagactccatctcaaaaaaataaataaataaaaataataaaaaataaaaatgggtccagagtttccgttttgtaagatgaaatacgttctgaagatggatggtggtaatgtttgtacaacaatgtgaatgtacttaatgctactgagctgtacacataaaaagtggttaaaatgatattcagaaacttacactaaggaaatacaagtttccgaattaaccaatacagaatttttttgtttttgtttttgagacggagtcttgctctgtcgcctaggctggagtgcagtggcacgatctcagctcactgcaacctctgcctcccaggttcacgccattctcctgcctcagcctccccagtagctgggactacaggcgcccgccaccgcgcccggctaattttttgtatttttactagagacggggtttcactgtgttagccaggatggtcttgatctcttgtgatccacctgcctcggcctcccaaagtgctgggattacaggtgtaagccaccgcacccggccccaatacagaatttaaaataactgtcttaaacatgttcagtgagctaaaacagaattcagacaactaaatgaaatcaggaaaatgatgcctgaagaaaaatggtaaattttatgtatattttactccaatttttaaacataattaaaacaaaagccagcattgcttatttcattttttaattataaaaagcagttgaaggaattcttcagcaaggtccttttgcaccccaaccccatcacacacccgacatttggcaacctgcagagaccttttttgggggttgggtaccacgggcatctggtgggtagagatcagcgatgctgctaaacatcctacagcgcacaggacagctcctcactataaataattatccagcctcaaatgttagtactgctgaggttgagataccctgaaatagaatgatgaccaattaaaagcctagagaggatcttatttgattgcatctttgtttagggaagaaaaatgatgacagtatgaaaattgggctgtacagtgaaaattgagattcattaagaggtatattaatctgctggggcatatcaccaactgggtggcttaaacaacagaagttaattctctcacagttctggaggctagaagtctaagggcaaggcactggcagggatgttttctggggaggcctctctcctcggcttgcagtgcagatgtctgtcatctctgagtcttctcatggtttgcacttaactcctgccgtctctttcttttatttttttgagatggagtctcgctctgtctcccaggctggagtaaagtggcgcgatctcagctcactgcaagctccgcctcccgggttcacgccattctcctgcctcagcctcccgagtagctgggactacaggtgcctgccaccacgcccggctaattttttgtattttttagtagagacagggtttcactgtgttagccaggatggtctcaatctcctgacctcatgatctgccctcctcggcctcccaaactgctgggattacaggtgtgagccaccgcacccggcctatctcttttttttcttagaagtacaacagtcctattggattagggccccactctgtgaccttatttatttccgtaaaggccttatctgcaaatacagttgtattgggacttagaacaatatatggatttgggttaggggggacacaattcagttcattatattctgccatctggcccccctcaaatttatgtcccttcacttcaaaaatacattcaccccatctcaacagttctgaacatctcaattcattccggcatcaactccaagttcagagtctcatctaaatagcatccaactcaggtataggggagacttgaggtatgatccatcctgaggcataattcctcccagctgtgatgggatggtacaggcacaggatagacattaccattccaaaagggagaaaccagaagaaagagcttctaagcaagtccaaaacctagccaggcaaatcccattacatcttaaggctagagaatcatcctctttggctccacgctctgccctccaggccctctagggtagtggctttgtccctgagggctgtggtcagaggcagctgggtttgctgtaactaatagaggtggccctaccctgtgaaatcaaggagtaggcaggccttccctgagcttatatactctgtgtctcggtggcagtggcagcactgggggtctctaaattgcccttgggatcatccttccttttcttgaaggacaaagaatgtttgcatccaggtagctctgctgtcagaagtccaaaagccttactttattttattccatgtccatcccctttagtgcaagatgccagtgtctctgctggtataatcccatctcttgtccttgcttctgctgagatggctgattaagtctaggtaatctctttagagggggagtgtccagccacacccttgacttttctctctgtaacactcttattttttgcaatatggatagcctgagaattttctgactctagttcctgattccctgttgcttaacaatttcttctttaattcgtctttttccttttgcattttacagtaaccagtaaggagaaaccaggttgtatcttcaacactttccttacaaatctcccctgctaaatatgcaaggttgtcaatcacaaagccacttctccatttctatgtagttgttacagtgacccctatctcatgatccaaatctgtatttagggttctccagaaaaacaagcagtaggattttttttatatgtaggagatttattaaaaggaattggctcatgcaagtatggattctggtgagtccaaaatatgcagcgtgggccagcagcctggaaacatgggagagttgatggtgcagatgaaagccaaaggcagtctcttgctcaggaaagtcagggtttttgttctgcccaggtttttcagctaattggatggggcccatccacattatggagggaactgtgcttactgaaagctcaccaacttaaatgttaatctccaaagattcattccggattgacacataaaattaaccatcactggaggtaatgataatagtctagataagacaggccagcaccaatagaggtttaaaaaaatctgagtgaaaatgggtattacagaccagaaaacataattggatgtgggagtaagtgcaaaattacaagcctttggttttgcaaagatggtggtaccgtttttctaaaatgcccagggcagaagacactgcacttactgagaatcattgctcagaaagtgattctccacctcggctacacatagaatcatctggaagattttaggaatctctgtgtccaagctatgctgcataccagttaaatctaaattcttggcgtaaggccaggcgtggtggctcaagtgtataataccagcattttaggaggccaaggcaggcggatcacctgaggtgaggtgagtttgagaccagcttggccaacatggtgaagccccgtctctactgaaaatacagacattagccggctgtggtggcacatggctgtaaatcccagctacttgggaggctgaggtaggagaattgcttgagcccaggaggtgaaggttgcagtgagctgagattgcatcattgcactccagcctgctgggcaacagagtgagactccgtctcaaaaataaatagataaatgaaacaaataataaatacattccggatgtgagaccgggcatcagtatttaaaaacctctctaggtgattccagagtgtaaccagccttgagaaccactattgaaagaagcagagtcatgagaagccttttaaaaaaattctgcctgcccaacaaaatcctggagtacatcagcccaagtttcatttctgtgcttctttattttcctagctggccttggtcgcacgggcactctgatagcctgctacatcatgaagcattacaggatgacagcagccgagaccattgcgtgggtcaggatctgcagacctggctcggtgattgggcctcagcagcagtttttggtgatgtaagtagtagcctacgtctgtagttcccagggaacatgtggggttggaatctgatggggagtggaatttcctttagtttccaacaacaacagataatctggtaggaagaagttgttcatgtatctttctggaaagctctattttgatgttatttaaatgctctaggaagcaaaccaacctctggctggaaggggactattttcgtcagaagttaaaggggcaggagaatggacaacacagagcagccttctccaaacttctctctggcgttgatgacatttccataaatggggtcgagaatcaagatcagcaagaacccgaaccggtaatcaagccgtttctgttgcgatgttgttactgctttaactgctattgagaacctgtcagggtatggagaaaaccgtaggtaaaataataaagcagctcttggatgattgtcagttttttatatttataaccctctctaggcactttttacccaaaatagtggaaacaaggttgtgtgtccataaaactatgttttacttactcagcaggtgcataaaaggttgtgaagtgagctcttcagccagatctacccctgcccctcacccctttttgccatttcacaacagctgatttaggaaagcaatcattctcaaatagagagcttttaacaaatcaaaggcttagggggtagcagtactactacattaagtggtagtaagtacactgagattttaaaaagagcgttttcaaacttgaaagcccattaaccctcttcactgttgatgtgttttctaacaagagtgctgctgtgttgtctctgaaagtcaactttggctgtcttaaaatgtcacctgaagcttgattgtgaaagggaaaaatattctagagcttgcagaaacttggactgtgttcatgtggataaattgctgctctgctgtactgcattaataagtgcaacttaaatcattagctcagtgtttttttacttacacagtacagtgatgatgacgaaatcaatggagtgacacaaggtgatagacttcgggccttgaaaagcagaagacaatccaaaacaaacgctattcctctcacgtgagtctgggttcctttgttgtggttgatgtttcttcatatgtgtgtggggtccttggtgagggtttttcctgtacatttttctccatagttgcaagcccatgatgccactttgaaatgcttgcctatgttatttaaaacctaggggtgctggccttggaagctctcagctgtcccttgtttaccttggtcctcatgagcctttatgggtgggaaggcgacatcagggatactttttctccatgaataatcagcatggggcatcctcaggagcgcgacagcagatgtaaagcccaggatgccagacttgtccatagttactaaagtggtgtatttctttacatttgccatgttgcagatcatttgttttgataagcatgacatgatggcttaatgacattatgttgttttggggcaacaatgaactggtctaaactatattttgggtttttcgtttgtttctttggggaatgattttctaattatagaggaagatttagcctgagaataggaaatgttgtagtactgagtgtatgtatgtctatgtgtacattcttgtgaatgtgtgttagttgggattcaacctgatggagcatccaagattgttagaaaaatatgcagaagcaaagtacatgaccatggtattttttgtaggctgttctttagtaaatgctcccacttgttgccattggatttcttccttctagttacttcctttttcattgtgggacaccagatttccagccttcttttttgcggggagggagtgtgatggacatagatcatttattcagtaagcatcttgtaatatggtaaggaagtatgatataatataccatttatattggcagagaacaggttttcttttcaattaaaagtaattcctcactagtgtctcgtcataaaaattctgaagtagaattacacctaaggcatgtgtcattatgggttgctcccctgggaggttcttcttaaaagacccaaggcaaagaattgagttttacaatatgcagtgttatgtgaatgaatgtagggcatccattttgattataggcatttattaagcatttcttttgcaacttagtggtactttagtcaactatacttttttaaaaatggtgccttttggccaggtgtggtggctcatgcctgtaatcccagcactttgggaggccaaggtgggcagatcacctgaggtcaggagttcaagaccagcctggccaatatggtgaaaccccgtctctacaaaaatacaaaaactagccgggcatgatggtgggagctgtaggcattataggatcccagctactcgggagggtgaggcaggaggatcgcttgaacccgggaggcagagattgcattgagccgagatcgtgccattgcactccagcctgggtgacagagtgagactctatctcaaaaaacaaacaaacaaacaaaaatagtgcctttgtataatttacttaactccaaatgccattttgtttttaatttccttattaaaagtcttcacctaaggccttaatggtttttctttggaagtattatggtggctccaggtaatcatccagatactaattctggatgtggtggaggaggcaggcagcaccctcgagcagtgcttctcagacttcagtgtgcaggaggcacccgggcgcttgttgaaatatgggttatgattggtggggtgggggtggggcccaagagttcacatttctatccgaggctgctggtccagggaccacacattgaattgcaagccctaggaaactgatgcttttgtgggttgattttagctgtgtctgggattttttgttttgtttttcagaatcagcatcatcagtttatgttttaatattttgttgcctgctgttcaaaagtcaagttgagagtcaggggatacaaatcctgcttagtcaaaagtttttgttaaataggaaatttcctttagtcaccctctgaatctgctactctcattaacgtgagttcaaatctagctgggcgtggctgtgcgcacctgtagaccaggctatgcgggaggctgaggcaacaggactacttgagcccaggagtctgaggctgcagtgagccatgatcactgcatccagcctgggtgacagagtgagaccctgtctaaataaataagtaaaatcaagtacaatggtaaaagttaaaaaacaaagaggtagctcaggattccttttggtaatatcccaaaaacaatatatataaatagccccacataacacaaataacaaagttttaggccacacttttaaagaagaaagcgaaatgctagtttttctaagctctgagttatgtgtatagacccgaggggatttttgatgagtctcagcaaatctccttcctcctcccttacaacattttgcttatccccgtctctgctttttcaaaccctctctgctattatttgcagttttttggccctagaaaagatcaattgaagattttctttctttccctcttgtgtctatgttgttattttaggaatagaagtccctgagggactgttctcaacagttgcttgggttgaaaaatacaaaatcaatttcttcatccaagtttgactcattgatttctgtgagcaagttattttgctttagcattggcacttagccttatgaaaatacagtacatgcaagaaggaaagttagtgagaaatacacaagtactagtgattcttaggagaaggttatagtacataaaatattattccaatgattggtttctctttttttttttttttttttttttaagacagagtcttgctctgttggccgggctggagtgcaatggtgtgccctcggctcactgcaacctctgcctcccaggttcaagtgattctgctgcctgagcctccggagtatctgggattatgcaccaccacacccagctaattttttgtatttttagtagagacaaggtttcaccatgttggccaggctggtctcgaaatcctgacctcaagtggtacacccacctcagcctcccaaagtgctaggattacaggcatgaaccaccggcgcctggccggtttctcttttataaatggtcagttttgggggagagtttaagtttttagtgattataaaatggccatttgctcagcctgtctgatcctgactacaatgatgacaggaaaccatgtggcaccatgacattgagctgatcttcaggacgtgatgacaagtatattgtctgtgctaaaatggatttggtagattgcataacttgagccatgaggcctgtcgttctgcatactgatggttttggtaggtttggagatgagtatatctgttagcaatggaaaataattctttttttatttttattttttatttttatttttgagacagagtatcgccctgtcgcccaggctggagtaaagtggtgcgatctcggctcactgcaagctccgcctcctgggatcatgccattctcctgcctcagcctcccaagtagctgggaatacaggcgcccaccaccacgcccggctaaatttttgtatttttagtagagacagggtttcactgtgttagccaggatggtctcgatctcctgacctcgtgatctgcccaccttggcctcccaaagtgctgggattacaggtgtgagccactgcacccggccggaaaataattcttaagccatgaggtttactagaggaaaaagtaaccatctataatgctgacacttggacattcgggccattctgcctttaaggaactgaaggtgaaggctgggatcggtagagagttctctagggctcccagaccatttattcattccatttaaatattcacccctgtgatctttatgtatattagtagcttgttttttttgtgggaagattaaataagatggtgtgggtataacttgtggggtaaggttaggctgtatttcgagttcaccctttagtctaatccctttccacaatataggatgcctggcatgtaatttctttttccccgagacagagtcttgctttgtcacccaggctggggtacagtggcgtaatcttggctcactgcaacctccaccttatgggttcaagtgattctcctgcctcagcctcctgagtagctgggaatacaggcacacgccaccacgcctcgctaatttttgtatttttagtagagatggggtttcaccgtgttggccaggctggtctcaaactcctgacctcgtgatctgcccgcctcagcctcctaaagtgctgggattacaggcgtgagccactgcgcctggcctgacatgtaatttttaatgatgacagtgatgaggtcaacaataaaaatgacatgataagccaaatcagccatttccaaattgattagcagtactctgcacacagcagatgctcagtagaggctctaatatttggtcacagatgtatccaggtgaccatttggaagtatagtcattggaaagagcttctgcccttccaaatgggaggaggtttccttcctcactgctagaacccagaccaatggattaagaaacaccaagctgaggctggacacagtggctcatgcctgtaatcccagtgctttgggagttcaaggcagcaggatcacttgagcccaggagttcgagaccagcctggccaacatagtgagattctgtctctacaaaaaaaataaaaaaaaaaaactgggcatggtggcatgaacaggcagtctcagctgctactcaggaggctgatgtgggaggattgcttgtgcctaggagttggaggttacagtgaactatgataacgccactgcactccagcctgggcaacagagcaagacccctgtttctttctttctttcttcttctttttttttttttttttttttgagacggagtcttgctctgtcgcccaggctggagtgcagtggcgcaatcttggctcactgcaagctccacctcccaggttcatgccattctcctgcctcagcctcccgagtagcgtggtgcctgccaccacgcccggctaattttttgtatttttagtagagacggggtttcaccatgttagccaggatggtcttgatctcctgacctcgtgatccgcccgcctcagcctcccaaagtgctgggattacaggtgtgagccaccacgcccggcctttatttttttttattttttttattttttgagacagagtctcgctctgtcggccaggctagagtgcagtggcatgatctcggctcactgcaacctccgcctcccgagctcaagcaattctcctgccccaacttcccgagtagctgggattacaggcatatgccaccacgtctggctaatttttgtatttttttagtagagacggggtttcaccatgttggccaggctggtctcgaactcctgacctcaggtgatccacctgcctcagcctcccaaagtgctgggattacaggcatgagccactgcgcccggccgacccctgtttcttaaaaataaaaaagaggcagggtgaggtcaggagttcaagaccagcctaaccaacatggagaaaccccatctgtactaaaaatgcaaaattagctgggcatggtggcacatgcctgtaatcccagttgcttgggaggctgaggcagaattgcttgaacccgggagggggaggttgcagtgagccgagatcacaccactgcactccagcctgggcgacaagagtgaaactccatctcaaaaaaaattaaataaataaataataaaatagagctcaggtgcgatggctcacgcctataatcccagcattttgggatgctgaggcaggcggatcacctgagatcaggagtttgagaccagcctggccaacgtggtgaaaccctgtattaaaaatacagtacttagccgggcgtggtgatgtgcgcctctaatcccaactactcaggaggctgcagtgggagaattgtttgaacctgggaagcggaggttgcagtgagccaaaatcacgccattgcactccgggctgggtgacagagcaagactccatctcaaaaaattataataattaaaaaataaaaaataagaaagaaacaccaagctgaaagccaactagtatgaggaaaatgagtgtggaaaacaactaagaaaagtctatagtatgcatacctaagtgaaattttgctcattttgtgttgccctgggttaaatgtgaaccatattataaaaatgtgccattcccttagcttcctggatggctcaggagttagtaactcccttgaagtgagatcagttctgctgtattacgttcatttttagttgtgcctcctgtgattttgttaactagtctggggttttgtgtttttttgtttgtttgtttttggttatctggttttgcctcctttgccccttgtggtttgctttagttttctgtgtgtgcacatcttctgctttttgaagaacctcaatcatttatctgtgactgatttcagtatcataaagttaaattaacatggggtagttatctcactagtgactgagtcccaaagtatgaaacctgtttaaacacagcatttttttattcaacataaaatggcaaaactccatccttgttgaccacccctttgtatccctgttgctgttggctgggcttttagggtgtctaaaattcacatatggcttgattgattgatgattgcgtaatttattttggcttcccaatttgaacatctgttctttccccttcacccctttccagatgtcccctagctgtgctgacctctgcactgtgtagtgttgtcatctggtggattgtttgtgactacattcttcccatcctgctattctgtctcgatggtttcagaacacagtagccatcaggaccccctgacagatagctgctgtaagtgtcccgttctgtttctctgccgttgcttacttctggtgcctagtgtggttcccacaatgcatgtttttctccttgtcagctcctagctttgttggtttgcctattttcaaaggttctttttctgaatcttttcaattaatgggatggtggtggggagggaaggtgggcttcactgttcctctcatagaaaggatattgaaagtaacatacgttgttttaaagttatgcttatccttaacatatttcaaaatagcagttgataaagacactgaaacagtttttcttcactgaaacagtttttcttccctatcaaaagtagttagcttaggataattggggtggttttattttcgtcagttggctatacaatttccctctagttttctgtatcttgagtatgtccttcccagtctagcaaagaagcatttttcccactgatctactttcattaaatatgtgattttgtagcctcgaaatctgccattgtacagcagctctctcataagtcttctctctttagtgtgcagaatttcctgctctgtctcattttcctcctcccctttagggaatacagtaagtacagtgtgtagcacttgatgctaaatgaaagtaggaggtcggagctgaggtcgcctgtttaaattggtgcatttccatatgatggtcattgttcctgcttttctccttgcccagacatagccagaatgcctttaataggctaatagcagcaaatctgtattctcttgagatctttcatctttgaaatgaagaccttaacagcgaagaggctttatttctgcagaagaatgtacaagaggcccacttgtggaacagcatgttgaagacccccagaaggcgggtgtgtccgtgtcacggggtccaccgccacccttctgtgtctgagctgcgttcttccttctctgaagctttttccttaactcatattttaagaatttcttctcttgtctcctcttggacttggaagttatgaaagaatgcaaaagttccttgcaagatctcttccaaagaaaaattccattgcaaccaactctggtactttgtggtttcactgagtattttcacatagctgagaaagatttaaaaatcaagctgatttcactcttcagaattaggcaaaacctgcttaacttgctcctatttatggcattttcttgaatatcttacaaataaaagcttattgtcgcgcattcagacctgctgtatttctgagatagattaaccttttgggtgttttcttctttacttctcttagtcaactacgattgccacatattctgactcaagagcatcatgcactacatagagttattcttctcaaactgttccaagtggcaaagatgttctgaatgggtggagcagttgcaaataatgcttaggcactttgtggttgaatgatcattcccagggtaagtttaaacatggtctctatcaggctctcttcttttcagtattccatgtaaactataccttctgttgttattggtaatgacgtttgccattgtatttctagacccaagcagagtattcagttcagcctgactaattatttggaattttgagaagcaaaaagcttgtgacagttacagtggtgttaatcagtatcatctttgtagcacccccatgtctttctctcaaaagggttttatttgtaaggtggtgactcctgagctccaccatcctctgtcatcaccacccacctctgctggcagtggacgcaggtggtgtggcatcgtctgctaagttgtttccagtgaaaagctcctgttatgcagcatgcctggagaattaggccataacaacacttcaggcttctgagtcagactcagagatagtgggaaagccttctctggaggctgcagggcctcagggtcacctttgtgcacgctcttgtggtgtccggagtggacagccagtatacatagtgcatagttgccctgatggatttttttcttggaattggacatttatgttcgagacctggctttttagtttttggctttgccgtgttccttgggttgcagatttcactatatctgaaatctcagagtaccgaggctccaaggatgctgcagagaagaaggtgaactggaatataggcaagaggtaggtaggatggaggattttgtcagggcagatgggaaggaagaaaatacatctgctgcacactgctctgcaaagccatgcttggcctgggttggaaggcagaaggccgcgagtgcccgggttccctgtgacagaggcaacacgtcaccctctggtgcctgtcaggtggtgtgtgctgtcactcatgatagctcagtggagttctcccccaaccccgatttcatcagtgcataacctgcagttaggataaataccgtgttgtcagtgcaaataactggagtcttccgtggtgtggttaatacactcaagttctatcattctcttggttttaaagttccacagaaattactagctatttaatattattattatattagttcactttaatttacactaattttatagagaaataaatacttttaaaaagatgttttccagcagcctgagaatgactacaggatttagcagtagtgtcttgttttgaatggcatttaaacacttcagtcatagttttaatttgagaaatcaggattcagatttcctaagcaggcagtgtatcagctcttgtttttttctcagattaattattttgcagtgtgattgttgtctgtacttttggccaaccgtggcctcaaattatttgagaattaggtgttgtatttaaaaaaaaaaagccaacaggagtcttgttttctccgtgcgtaagggagtggccgaggggagcggatgagaacagtggcagcacgagtgccccggcctgggcttcagaagtagcaatgaagcagcagcagtttgttttgttttgtttggttttatgcaaaattctatattcaaattcttagcagagatgaataaatatttccccatcactttatataaacaaataatttttagggatgggcagactggctcatgcctataaatcccaacactttggaaggtcgaggaaagagaatcactgaggccagaattttgagaatagcctgggcaacatagcgagaccccatctctataaaataaaaaatgaaaaaattagctgggtgtggtggcatgtacctgtggtcccaactactctggaggctgaggtaggaggatcaattgagcccaggatttgaggctgctatgattgcgccactgcactccagcctgggcaacagagtgagaccctgtctcttaaaaaaaaaaaaaaaaagaaaaaaaattttaaaaacaattccttgtttttagaagtagaattcacaagccagggtaatagttgtctttaatcatacaattaagatgcatatacactcttcttttttttttttatacaaagtctctatcacctggctggagatcggtgacacaaacatggctcactgcagtcttgacctcccaggctcaagtgatcctcctacctcaacctcccaagtagctggaaccaaggcacgccccaccacgcccggctaattattattattattttatagagaggatgtctcactatattttagaatttgggcttcttaatggtgtcttgtttcatgactgaaaatctgagaagctacttttacttttgggcataaagacttgtttggctggtggatttctttggtgtgggaattgcttaaaatgtccaggctggtctcgaaattttggcctcaagtgatcctcctgccttggtctcccaaagtgctggaattacaggcataagccaccgcaaccacctcctttttctattttgttagaacattcaacatatcagatgatcacactctaggagaatttctgaaccaaacattggctgatttatccaggattcatgtccctctgtgagacagaaagctagtttcatggggccctcagaaatcctgcatgagtaaagtgaaatagtggggaaagctgcccatccccttctccccagaaggcttgggaccgctggcccagacaagctccaggttatgctctggttgcggagtctcgctctttggcccaggctggagtgcagtggcacgatctcggctcactacaacctctgctgcccaggttcaagcagttctcctgcctcagccacctgagtagttgggattataggcacctgccaccacactcggctaatttttgtatttttagtagagacggggtttcaccatcttggccaggctgctcttgaactcctgacctcgtgatccaaccacctcggcctctcaaagtgctaggattacaggtgtgagccaccgtgcccagcctcttgttgcttttttagtgatgagatgtttagcattttactaaatgttggatatgctttggtttgggtcatgctaaggttgtagaaatttattaatcttagcctattttaaggccctgtctttggtatattagccagcatggtggtagctgaggcccgtgaggtgggatgctcactaattgtaatggttcaactttttactcctttgagctgggttctcataagttgttattggctttctcacctttatgtttgaataggagagaagaaagcttgttaagtcagtattttctctttcagagaattaaaagttggtatctataaatgtgtgtatatgtgtttagtttgtcattgattatctcttgaagaaaagaattgcatataggcctggtgtggtggctcacacctgtaatcccagcactttgggagtaagtgaggtgggcgaatcacctgagatcaggagttcgagaccagcttggccaacatggcaaagcctcatctctactaaaaatacaaaaattaaccaggtgaggtggtgggcgcctgcggtcccagctactcaggaggctgaggcaggaggatcgcttgaacctgggaggcagaggttgcagtgagtcgagatcacgccactgcactccagcctgggcgacagagcaagactccatctcaaaaaaaaaaaaaaagaattgcatataaaatcttttgatgtcttctgctgttttccctataacaatttaaagaggaaagaaaaaaaaaaaccaaaggaccatctgcctcttaaaggacattccgtgtggcctttatctcaggatgttcttttctgattcatcgtgtgcttcctcctgggcagcctactctcatatgcaccagtttctcaagctttttagagtttaattaaggcaagctttacaaaatttaagtgttttcactttcattttagtggcacttggagatttagtaagtgttatatataattcaggcaaaactcatattttgcttaaacactttctaaaattttgaaacgttatataaaattagtattgatttagtggattattacccatacttacagctttgaagagtgaatattgtatagttatttcctaaatttatgttcctattctttagaatttgagctcttaatggtgtcttgtttcatgactgaaagtctgagaagctacttctacttttgttgggcacaaagatttctttagctggtggatttctttggtgtgggaattgcttaaaatgccaagtcattcgccttccaggagcaaagccctctggttgtctttgtgtaaccttcaaagagaaacgagatgcttcattttaaaaggccttgatgtgaaaatgtgtttcagatttttttggtaaatgtgttgatggaaaatcctctcaattctcaagataatttgcactaaagtgcaaaaatactttcctctgtcaagtatttgcaaatggtttcagtgaatataatcttatttttttccaactattttcagagtaattcttcaatccagtgttcagagctgtaaaacatctgaacctaacatttctggcagtgcaggcattactaaaagaaccaccagatctgcttcaaggaaaagcagtgttaaaaggtgagaaaagaatcctactcttctgaaaagttgcaagcgtttgttttccagtttaatatttggaccctacctctggagactgacatgaaattaggagaaagtagagtctctgtgatgggaaattcatcaaatgtgtattccttgttcattatctaagaaaatctggaccattttaatgtaggcttttgttttgttttttagaagtaattctcaacactggaagtatggtctctgggtcatgatatgggaaagttttaagttaagaatttccaaagctggctgtcaggacttggaggacatttttctaggtgtatatcagatacagcatcattgctggacgattagctgcaaatgaatgtgatggtagaaatgagataaccagagagtttgaagatccttctctacctagtgactctttgtcctcttggccacagcccacacccgaggcactagttctttcactgtcgtcactgtcttcagtgagtgtaggcagaatttcacaaggaaaccaatgtgttctgtggccacgtcggtgactctgttgtctttggatatttctcatgaagtggacatgtcatttttaaagtattctgaaaacagatcccatctgaagagagaataaatagcccaggagtggaagtggggatagatggctcaggagtagaagggggcaccttttcatcgttgcctggtgttggcagcccatgcagtcctgtttctgtcctcctggtaaaaacgatctcttctaatagacatgagcgacctgaagataatcagaaccagactttaaaatgtcctgcacgtgtaccctgcttcttttcagcttccctgccatgtatatccgaggctttgggcctaggggccttatcagtgtgaaattagtccccagtgcaaagcagccagtctcccaagagaccttggcagagctgggagttctgtgtgctttgccttttgaagactcattcagctctgccatgtctcctctacactgttttgtacaaccttactgcacacttaacactcgcatggggatgcagcagtgccccggcataaggattggaggactgtcaggcactgactcatgattccaggatttaaaatttttcattagaaatgtaccaaatattcctatttctttactgtttgattcttcttgagaagaatattagagaaatactgaccaaaggtcaaagatttcggtacattggaacaatagcggagtgttatttataacagtgagaaacaggaaatgggctcaagattgttacattatgccaaatgaattgggagtcatacagtttagtacacgaagcagtaagtgaaaagagccatgcataacaattctgaagtatgggccgggtgcggtggctcgcgcctgtaatcccagcactttgggaggcggaggcaggtggaccacttgaggtcaggagtttgagaccagcctggccaacatagtgaaaccccgtctctactaaaaatacaaaaattagccaggtgtggtggcaggcacctgtggtcccagctactcgggaggctgaggcaggagaatcgcttaaacatgggaggcggaggtttcagtgagtcatgatcacaccactgtactccagcctgggcgacagagtgagactctgtctcaaaaaagaaaaaaaaaaaattctgaagtatgactctaattttgtaagcgtaagtatactatatatgtatagaaatatagagatgtataaatatttatatacctacaatacatctgtatttatagatgagtaagtttctatatatgcatagaaataagacaggaaaaatatgctatgatactaataaaagttctggttggtgggacagttgggatttttttcttttttatcgtcttattttccaatttttctacaataaatgaagggaaatgggagtgttttaactgacactttttggtgagccaagctattaaaaattcaggctgggcgcggtggctcacgcctgtaatcccaggactttgggaggccgaggcaggtagattatgaggtcaggagttcaagaccagcctggccaagatggtgaaactctgtctctactaaaaatacaaaaattagctgggtgcagtggcgggtgcctgtaatcccagctactcgggaggctgaggctggagaatcacttgaactttggaggcggaggttgcagtgagctgagatcgcgccattgcactctagcctgggcaacagagcaagactctgtctcaaaaaaaaaaaaatcaaataaaaagcctatcgttgatgacagttaattgttaattttgacatgtcttgaaggggcatattctttttaggtatgagtgctcaggcttttttttttttttttttcctttgacatggagttgcccaggctggagagcagtagtgttttctcggctcactgcaaacttcgtcttccaggttcaaaccattctcctgcctcatcctcccgcctcatcctcccaagtagctgggattactacttgtgggtggcatgtgccaccacacctggctaatttttgtatttttagtagagacggggtttcaccattttggccaggctgatcttgaactcctgacctcaagtggtccacctgcctcagccccccaaagtgctgggattacaggcgtgagccacggcgcccggccgctcaggcttttgttaacagcgtagtgtgtcttgcacatttaattctgctgtttgcttttttagattatgctttttaggttacagaagagtagagtccgggagcctggctggcacttgccaggtcatatcgtcttcctgtgaggaaggaagggctggccttgcctctgtttttctatctaggtctcgttgcgttttcatgtcactctagtaacctgaactcctgcctctctggagaagtggttcctggttgcagcaagcatctgcctcaggtccctggcagggatgctttgagggtcctaaggtagatttcagagtcagtaatctggactgaatgttgaaatgacccaaagcagcttccaggaatttgggatagttctgaaaaccaaaaagacttcttttaaattccaaaatggactttcagagatgatgtggagagcaaaaggagtctaacagtgaggattaactgggactcacagtttatttccccaccttcctctaagtgggttctttctttgtgcctcttttgggactttgtcctgtgttcacatcaccctacctgttatccacctacagcttacaaaagaaaggcaaattatgtataggttttaagaattggagttagccaagctgtagcctggagcttttatcctactgaatattattcataatatcatactaaatagtattcatttctgtttggagggcaagagggaattagtatattggtgcacggtctgattctggacaaaatagtatgagctaagattgttgagtaaatttaaagtattgagttgaaatctttaaacagcagtagaaaaaaaaatagagcacccttttggggtcctttcatccctacctgcaacgtagcaggtttaccagttcctactggtttgtcatcatctctgcggcacatgggaacttgaccttccattttcatgttccttggcatccaggatgaagactccacccaaactcgctttgcgcttaattggtgcttttgatttttggttttactgagaggctcttcagctttggggaactttttcaaaaacgtcaaaagagcaattacttggggcagctgaaaaaataggagtgatgtcttaactatttgtctttgggaaaaggtgccactgtttctcacagaagatgactatcccctcgtgtatccatttgaagctgtgccacatcgaaacctaaatctcatgtggccacaggtctgggacggcggccaggcagcctgtgtggccctcggtcctgccagggctctgtgtggcaccttctcattcccttccctgagtctggagagggaggtgagtgggcttctctacctcccacttcctgttagagctataaatccatgctaacctttctcttttaagaattaataaatccagtgaataattggctccgttgaatcggcctgttttcagtgttctcacatgacctctctgaagagctctcttagaacagtcttggaaatttcatcatgccccgagtgagagcctgcagccacctcatttgctcgcattcactcatgtcttcacgcagcccttccgctggtgcgtgtttgttagcttatgctgtttcttttgggcaggctcttctttttttaaaatgataacttcattcattttctaagaaactggcatgtacaagttactttaattctgagttgtatcactaggaaccatcactttctgctgcagctgccaaaccaaacctaaggtccggggctctggagtgctttgtacctaattcttcatattgtgggggctggggagagaaatgctcaggttctttccttagcatcttttttttttttttttaaatgagacagagtctcactctgttacccaggctggagtgctgtggtgcgatcttggctcactacaacctccacctcccaggttgaagtgattctcctgcctcagcctcctgcatagctgggaatacaggcgtgcatcaccacgcctggctaaaaattttcttctgtatttttagtagagatgaggtttcaccatgttggccaggctggtcttgactcctaaccttaggtgatctgcctgcctcggcctctcaaagtgctgggattacaggtgtgagccacggcgcccggcctctttccttagcttctaaaaccacgagtgttttcaggagcccttcagttgggagcagctgcatctaggacctctaacttcttcagtgttctcgggtggctttgctggtgtcacacctgccactgcctcttgaccctcagagtctcagatctgggcacctgttccgttgcctctgggtgttaatttttggctactgccattatctccaaagtccatcaggagaggagtcccagaaggttgtctccaaatgtttctttgtaaaatactgtttctctccagtgttttaaaatattaatgatcctttgaaattccagatattttcccacttgtctcactagctggtctggatctttgactcagtgctctgttgggatctctgaaaacgaaatgatcgattcaaacgcttctccttgaagagcgcagcagcagcagcatcgggcgaggagccctccagattggaagtggtttttctgactcttattttggttttgtttgctttctgaaagttgttactgacctgaaagtgtagcgtcgtgaactggggaaggagagaagagaggcaggatgagaatcgtggagtgcggaggcaggtagcccgtggggtgcctcctgtgctcggtggagctggaagccgcttaggtgccagagctttttctgtgaccaaattctggcttttgaaataacccagtaacagttctctatcttttcattctgcccgctcctcccacagcctggtccctcagaggaaaggaaggacaaggagtgctttgcagcacgtgcccctggcggcgtcatggtactttcctggccctgctgcccctgcccgtccgtcttttatgatttttatttactcgtattggtttttttaaatttctattttttgcagaactgagcctttttctgccctgcctttctcctgtttgtctttcctttgtggttgatattgtgttgtcttctccaaagtatttgtcattagaaacttacagcaagcgtatactttttagcatgtcagtatttttattatgttgccctccttgtctttgataactgcctgtggacgctgtgtaaactttctggtaaaaatccttttttttccccctgtagtctctccatttcaaggactaaaacagtcttgcgttaagtaaaaacctgtgaccagagctgaaggaagactctaggactgaaaactgcaacagaaattagcacaatttgaaaacaaaacaaaattgcaaaagccttagttgctttttccacctaagaagttgatcaatggagaaaatgtccactggagtttgaataatgaactttgagtttgggtgcaagcaaatgactcagagaagggtccagctctcaagctgaatgacaaacatgctgttgtaaatttagtctcaggtgtaaatacccaagccctctggtacccagggagctggctggtctgtggtgcatgtgtgtccctgtgatggcaatcattgtagttgctggccttcagaagaattgaggatctgatggaggttttttatgtatttattttctgttcaccttgtgaccctgtgtcaaaatttataaagatacaaaaggcattactgaaatggtactttctgtaatttgatactatttggcttaatcatcttcacttgactatttgtaatactgttgtaatgttaactctgttaagtacccaagctgcttgtcttccaccaaagagtgctttattaacaagaatctgtgaaaatcacatttaaacactgttgcatgttgtaagaccaggtggtaccttagtaacctaaaacttgcaagagaatattaatggtagctttagaagactcaggaggagaaactgacttcagagttggaagatgttgcaagtcgttcctttttctgtccttcagggactgaagaactgggaggctgcccattgtttggttgccagtcatacaaattaaaatcatatttccttccatgaatggaagaaacacactattggtttttccccttggaaacagcaatcccaaataatgtcggcttacaaaaaaaaaaagttaccacttttttagagtccttccctgtaacattggattttttttttcccttatgagatccacctaaggccattgacgtggcctgcgatctcagtgacaatgatctgcttctggatctcactgttgcctttggttagggaacacaactagtaactctgcagagtgccttctcccgcagccctactggaacacagcagagtctgtgccatgaagcagttacagaaacagaattgatgtgctgctaaaaaaaaaaaaaaaatggggcccgaaataaaagaatatatagtactcacctcagttccttccataagaagtgggtggtttaatgattgttaagccatttttgcctgtgccgggagcatggagggctgagatgtcgacaggcagtgggaaacaaatgccctcctaagccacaaggcgtgcgccagattagtaggcaactccattttaagaagctgcctttttcacaaaactggaagaaataaaagcggttggaataaacaagttaaaagtctttaatgcaaaaagtaattgaaaggcagtgcctccattttggtgtactttcttggaagaaagtataaaattgaccggcatcatgagagacggaagatgccgtgttctcagccaaacaagcaactctttccccgccaggcactgtcgggtggggtcaggccagcttttaaacactggggactggatcacagaaaaacagtggttttctgtccctggaaatgaataggcacaaagacccacttggctgtgggcagactactcttcaataagatttgggtgggaggaggaacattccttttgctattttgagctgagacaatataaatattcaaactgtgccatgcataaagcattgaattctcagggcacctcttcttccccttaccccttttaaggccatcccctccattaataataatccaggtagttgtgaaaatcgtgcttctatctgatcccttcttagtttggcttttcatcccatcagaacaagtaaacgtaggcgccacagctcttgtgagtactgtctccctcacggtgaatgagcctcctggtgtttcgtccaagaaaagaaagggtgtcactggaaccacagccctttttcattttataaactgcctcttcatgttgcctgctcaagtttccacctagaattgctatcactgtggctctttctaaaaatctttctatttaactggttcactgaaattagtcatagaaaacttgtgatttggtgaagaggcattccttgtaataaccaaatgacttgggatggtgtgcatagcaagggcagtgttacacttatgaggactgtctctagcatccaggaagtctctgggtctgagggatggaaagttcttcctgctatgaatgagagtggactcttcccctcacccccaactgaaaccacaaacaaccagaatcttctggaattctgacttagagtcgttgttatagaagaccttgttgctatggaacatgaaactgtgtgtcagatggagagatccccttaacctaagagccttaaatagccctgaaagtacactgggacggtttgcgatggaattaaaattggaagtgaatatttttaggtgctcttgaagctttctggggactcaaaattatcaaaagtcagggacagtccggaggaagagcgtctgcaaaactgggttcctagaagtatagacggacttagctttttgtagaatttggtgaggagcagcgcctcgtgagagcagaatggcctggcgtggccagtgcttcccggcagcacgcagctctgcggcctccagaattcccctgttctgagcttgatgcccctagcctgtcccctacctacttcctcccctcctctctagccctctcacaggggtgattgctacctctctgttttcttgggcctaggcaagttttagaggagttcccaagcattgttatgaggccagtgtgctcgctgggctgggcgggatggcctgggcttgtgtgtggcctgagggctctcctggggccttctcttttcccagtcacctttggagccacagaagcagtgcactcattggatgtctgttcttaacacagcttctctttctacattaaaaaaaatcattattgcattttggaaagcagtgctcatcaaaagcaacttttaaaacctattttattgttcctttaaatgttctctcccgctgaaactgccctggagaggctatctgctgctcttccatttacccacatcaggttattctccatgtcactcagtggagatgactccagatgtgtttaaagactggacaattcacctatactgtgtaggaaattacctccttaattacctggtagaattgtcagcagacatgttcatccgatgatagtactgcagttttctattaataatttgcagacttttatctaacctgcactcatgtacagattattaaaagttttaaaatgtaactgatcagtattgatcaatcattgtcttgatttttttttacagcgtatatttctaatcatattttttaaagccaagagaactggttgaatgaatgtttattttcctgaaggtatttttaagataaagcttcctaatggcgtgtaaactttgcatatgtatgtagtttgatacatattgtcacatttgaaaatcttgtgggttgtaactggttttatacaaaatatcgaatagtggaaattgtataattacaatcatgtaattaaaagtattaacccaacagcctttttgtttattgtgttacttaccaagcattttgaattctggtaggcagtgggttagatcataaagcagaggtaacccggaatctgtgtaagttttctaggacggccataatggaataccccagactgggtggctgacacagaagttcatttcctcacagttctggaggctgcaagtccacgaccaagctgtgggcgggcttggtttctcccaaggcctctctcctgggcttggaggcgctgcctcctcgcagggcctctctttggtgcctgcgtggccctggtgcctctcttcccctctactcccctctcaagaggacaccagtcagattggattggggcttaccccgatggcctcattttaacttcaccacgtcgttaaagtccccatgtccacatagagccacatctgaaggggctggggttagggctttagtgtttgaatctggaagttagtccagcccccttctgtagggtaaggtggtgagtgacagggggctcctgctgccaggccattcctcacaccccagcaccagctcacacaacacaaagttttgactttctgcagacctctaaagataagacttaagtcagtcaggctcttgggatcctgcagggcattttgcctgccaaggtcgggcggcaccggccccagcaccctccccagcttgtggtccaaccccggacgccagacccctgctttctacctgccttgcctctggtgccgggcaggaccccaagggctcagtgtccacacctcacacacagcttactgctgagactcaagaccctgtgttctgtcgagttctacccagttcccccaaggagctgtgcttggattcacactgggttacaagtgtccaaagtaaaaaccagagacctgccttctcgcccctctcccgactccacaccacacatgaccccccagagtgttcatttgcagaccctggctctgtgggagctgtggcctctccctgcccctccatggcttcccctgaggccactagagctctcccctgacccactagagctcaggcagctggcgccaccacgcagctccgtgaagtccctgagtgctgcaaaggggccggcttggaggcattgtttgagatgaaaccacgaggcatgtctgttcctcctggggggctgggccttctaggcctgtggctgggaggcagcaggctgcagggacccctggtccttagagacttgtctccttccctgtcatctagagccactcggcccagggcccatccaccttgtgcgggatttgctcatcccctctgcttccattgcttaagtgaaatggaaatgaaaagaatccctaccttagcagttggtatgagagttaaaataacacgtggaaagtgcttaaaacagtatcggggcatatctttcaattcgctactttgtcatatattttaggtcattttctctagataattggggaaagaatgactgatagcagattacagtccctcagtttctgatatttttggtacctgcagcataattttatgcacaggtaatggtgtaaacatttaaaaagaggtcacgtaaactattttgccttgaagtggggacccacacgctgaagctaagtctcgagagtggttgttcagaggcaagcttgggccatgggagaggagctgcaagggacccttcccgcggcccctcagtggactgaaatacaagttgccgtggaaagtgcaagtcccactgggcgtatctgccccagctccgccacttctgtggccttggggacccttgatctgctggccgagcctcacttagttcagtggtacaattggactagtgagcacctagcgtttggtttaacagaagtacgtggctgtgccttagctgggggactgtgacatcaactttgccgtctccccctcctctgtgtgtctaagtgcagctatgggtgcattggaaaggagcatctagggaggaattctccaagaacacgagctttagctcctctgtagcacgccctgactagctgccacactctcccggttgacgtcttactgtcagagcactgcatccgtgttctgcagaaattcttcctgggcggtgctggctatttccttaggataaattcttacaaaaggggtttctgggtcaaaaatttgtaagacgttaaagcttttgctgtacactgtgtgaaaaagcagcttggtacaattgttgagaacatgcattctgggcccaggctgtttgcaaacctaagtgctgccacttagcttagatttgggctaagtgacttaggctccctaaacccgtttcttctctgaaatggggatggcagtatccatcttagagggttgtgtgaggatgaaatgaaaagttaatatttttcatagctgagaacaagtgtctggcacacgctaagagccatatatattttgcctagtaaaaaaaataaaattaatgctgtccaggagaagtgtaaaaatgcacagtcgccgctgcccgctcctctcccgttagcagctgttgtgacgctggtgagctgctcagttaatagcaggacgctggcctcagcgccgtgggtagggggtcacgctcactgtcctgctgtattatgtcgtcctagctttagcttttccacattgattttgggcattttgtcttccaagcggttggcgcagcctgcccttacgtcctagcctccctgtgtctatccgtttattgggggagaaatggatccccctgagcaaagccttccggattcctccccagcgcctcgggggtccctggcctgtgtgggagtggggggcctcccgcctctgcctccccgcccctgcctccccgcctctaaccccgcctgactctttggcagcaagtctgcatggctttgacacgcttctggacgacgcgtgctgggtccacacctaaatccccaggtaaggaggccccggcctggccgcggaggctctaatgggccaagtctgtttctaaaggggtagacgactccgcgtgggagggccaccgtgtgctttgtgcgttgtgggactcggggaggacaatggtttctcctggccctgggtgtgtttctctgtgttaaacgacgtcttttcaggcggggccgttctccctggcgtgggactccggggaatgcagcgtgtctggcgtcctggcacccgcctactcggtgccaccggacggtccaggcccccatgcgtttccctggccccgggctgttgctgcccccagctgggaacggctcactcgcttccaatgccgcttgtcctgggcagtacacaggacagagaagccgcctcggtgctctcgggccggcgggcagaggaaggagctggaggaaggggcttctcggagggagggcgcgggacgggctccccgggagcgggtccgctgcacctcctccagcggggacttcagggtggcctgggcggtggagccagcggggtctcccttgcctgcgcctggattgcggggtcagccgggacccagccggagggagacgcacggagcgccccggcaggaccgcggttggcgtgtccttaagtagccgcggagtgtccactcagcactcactggccaggctggagggtaacggctgacggccgttctgggccccaacccaagtttgccttgcggttgagagttagcggcccaggaagctagtccttgccgtccacacaaactcaagccctgagacaggccctgtggtggtggtggtggtggtaagtacagcgctgtccatctcctcccttttccagcgatggttggctgtcccaggctgtcacctttctagaccggcttctgatctggctcgggatccacaaggactagacctgcggggaaggtctctcctggacacgcccgttgcccactgcaagttctctccaggtgcaattgaagcctctcagcaggtgcgtctgcctcattcttccactgggtattgagccatcagcccagggccttcctttaggtgggcctcggcctgactgggttgggaatggccgggctgacacccaccctgggatggtaggaggcccattccaggcgcagcagggcagtgctgctgacactttcttaggctaggagcccctgtgcgatgatctgatggaagctgaggcccctccatctccccagaaaagttcgcaccaaatttttgaaggctgcatcgatgggtcaacttagtgacttgctggctgtggccacacaccccaggtgtgctgtttgtacagatgccgtgtggaaggcacccccggagatatgcagtgatggcagggtctattcatcaatcagcaacacccacgcagcctcaccctgcctgggcctgccggggagcctcagtaaaaattcccagggcatctttctaccttggtcacagcaacccagttccccaagcatgtccctcataggccacacggcgttcccatttctcctgctgtctttctatccaccttccctcttcctgaaaacttccccagcatcaccgctggctccagctctatcctctcaccagcaaaacatgcaagttgtggtcagtttgcttagaacttgtctcagatacttgaaacgttttcctcactgttgctctgacgcaagacccgtggccagtatccatgtgggccgccagtacagttgtgcaggttgttcatcgcacaactccagggagtgccaggcacactgaagtcaatgtgagccaagttcctgggcaggggcggggggcgggggggggcagcacacatgggtgcccagaaagggcagccttgctgaaggcgccctcagtccctttgcagggtggtggttcttgagaaatgtcttaccctgcctcagtgtctgagaacatttgagactctcagaagcctcctgtgggtttatgtacaagttgatgccacatggcaggcactccttaccttacaaatggctttgagctcccaaagttatgtaattcagccctctgggattgggcacagttttgtaaagaaagtgttcaggccaggcgcggtggctcacgcctgtaatcccagcactttgggaggctgaggcaggtggatcatgaggtcaggagatcgagcccatcctggctaacacggtgaaaccccgtctctactaaaaatacaaaaaattagccgggcgtggtggcaggtacctgtagtcccagctacttgggaggctgaggcaggagaatggcatgaacccgggagacagagcttgcagtgagccgagatcgcgccactgcactgcagcctgggcgacagagcgagactccgacaaaaaagaaaggggaggggaggggaggggagacgggatgggacgggacgagactggacaggacgggaggggacgggaggggggaggggacgggaggggaggggaggaagaaaaggaagggaaagaaaggaaaggaaaggaagaaagaaagaaagaaaagagtgctcagatggcagtggttccctgattttccccacagaggactgattggcccaaggcgtagctgtggggggtgtgagagcctttgcaatctggtttgggaaattcctgtcatctagagtccaaggaaactttgtggccaggcagagagctttccaggagcaacaggagatgtgcagaaaagctgggctgggcaaagcaggcaggagccgctaggcctttaggcctagggagccaagttttagtcccatccggtttacatggagaatacctgagcgtgggccctctgcactgctgcagtgtgcagtaccctgctaggcaccatggccatcgccacatggctcagagtggctgagcacagaggcaaacactccatgtctcctttcatcccctgcctgaggtacaggcatcccttttcctgtcccctctcctaacagctttgcccaagggactagtcctttcactggaaatttcaggagtgtgtagaaaggatgtggggctcagggactgaatctggtttcagtttctaccttccctaatagtagccaggtagcaagaaagacagcgtccttgcctgactgtaaaatgacaaggcacgacaagacagggctcccaggctctcaagcaaacgctctgctccttcagtaaccaggctttgccataggtgcagggggaaagcgggtaggaggaggggcatccttcggacttaaagtctgaaagacttctttgaaaaggcagcactggcgtggaggggagcgcctggaggcagcgcgagtcctgggagcgcggggatgaggtggtgatcagcatggtccacgtggccaggctttggaggaaaacgtggttacaaggcagttctgcactttttttaagagatgaagtttttctctgtcacccaggctggagtgcagtggcatgatcatagttcactgtaacctcaaactcctgggctcaagccatcctcctgcctcagcctaccaagtagctatgactacaggtgtgtgccacccacctaattttaaaatttattgtagagacatggtcttactgtgttgctcaggctggtcttgagctcctggcctcaagcaatcctcccacctcagcctcccaaagtattacaggtgtgggccaccatgcccagtctagttttgcacttttatctgtatcttatttgataataaaaaggctttaaaatatccctgcattttttcttcctcattcccttttccacacctcatcctccatccacaacacaggccccctgtgggacacagccaggccaaagcctctcacgcccgcagcccaccccaggttgtctgaagcaggcatgagtgtcgggagggttcagggaaggctgttcacatgggccacggtccttgcagaaggctgagaggagacagcagcagccaaagaaaatgagcaaatctgtcttctgtgtctacagcggaggccgccatgtggagagagcaggcaggcccactgctgctgagaacagggcaggcacgggcagctcctgttctgcctttcccagcttcggagacgcaggctcagctgctccgaagcacctgccagcaccgcacagtacagtttcagaggacagcagtctccttcccgtgaagctcccatgtgctggaatggcatggacttgctgatcaacagaaggaaatggtctgaagtctgaccagcacaaggaaggaggctggctggctcagaggggcccaccttgcgtggaatgaaaacgccaaaggctcatgagcaacattaggctagaggggtcttgttcaaagcatccaactctgacttcggaggcattcccagccggcagcagtgtgtccagcctgcctcttcccaggctggtctgacatgcagcttaggctttcatcccaagttaggtactgacccctccctcttgggcagcacctccctttttaaaaaaatttttttttcttccaaagacagagtcttgctcttgttgtccaggctggagtgcagtggcgcgatctaggctcactgcaacctccttctcccaggttcaagcgactctcctgcctcagcctcctgagtagctgggattataggcgtctgccaccacgcccggctaatttctgtatttttagtagagacagggtttcaccatgttggccaggctggtctcgaactcctgacctcaagtgatctgcctgccttggcctcccaaagtgctgggattacaggtgtcagccaccgcacccagccaagcacccctatctctagaggatctggccccccagcccagttactgcagggcagctttccccacctggtgacaggctgtgcgcagcagccccaggacctcaccctgagctgagtcttcaggagccgccctggtggcacaactcagacacccctgaggcctagcagtcaactcctgattcagacatgatccagtccagcctgggcttggctataaccagctcaaacttgcttgacctccacttttcaggagacttggggacgacagccctcatcggcgtctttcatggggttaatctgcttgagtctaagtcgccagccagaaacgtggtgcccagggtgccctgcctcaggacatgtccacacccacgtcacaagcacctgaggagtccggccggggcactgtggtccaaaaggtcctgccgcctccgcatctgactgtcccaacggcatgctggtgacacccccctgcccttcgcttctgtcctccctggcttctctggggcacttggggctatgtacaacctggcacgatccagaaagggtgcaaacaaaatgcctacatccaggcacacgaccaagtcagcgagagctagccctggtaagcaaacatagcccattacaggttcagaacgtgcaccgggttccccaaaactgtcttcaaccacatgactcaacagctctatgggataggaactgtcagtgtttttgcaactgcaacattaaaccaagtgctgtgggcttttcaagtattattcacaacactaaaggaaagtttcttcaaagggctctctggctaatcttcaaagccgcagttaggcaaaatgacagtgtgacagcttcaaagccactgactcatgacacagccctgatgttgtaccggctaggttcagatttcagaaatcagggcacttgcatccattgccttttccaggaaagggaagaaaacactcagttgataaaccttagtactcagataataaataagagaccaaaagtaggctatcacccaaagcaaacatccttaactgaccctaacgtgtatggattcaactttgattattcaacaaaatcatgaccgactgctgtggcctggagtaaccaaaggactgttttctctacacaaagtcaggagcgaataccaacctttatttgcacttgggttccagttcaaagccaccttagacagtgtggcaaagtgggaaaaagcacagatcctgggaccaaggttcagattccatctcaagcgagcatatgaactgtgtgacaacaggcagacagtacctctgtgtctatgagaaagcggggagagcaacaccccagcttctagcagctctacagctgcctggacctgcaggccctcctaggcccacttcctccccagcacagtgtgtgttcccgggcgtgtgtggctctgggtccagctctgttcagggtgggactccaggtgaattactgaacctctgaggtgtacccccaaccccaaactttcaccaaaagcaataaagaggaactctagaactggagccaggactaagtgagaaaaactgcttataagtgcttaataaatactagttatttacaacttttgctcaagccgagggcagaggcctttgtacgcagctgccgaactctgactctagttctgcggaagaaaaggatgcggtatttgcttttgccatgatccctttccatttgattggcaggttaaataacatggtttttgaagtcacatacttaatattcttcctaaaaaccacccaaacactagatgtgtgtgtgcacacacacagaaaccacgaggtagtttaaatcaccattaaaaatcaacgctttctctgattctgtgtcacagagtggtggccagtggctacacaatagcgatttttaaatgattggttaagtgaaaaccagaactcaaaatattccaggagagaagataacatttacaagtaaacagtaagtgcaattgtattttaatttcttggtctccgaaaactcagctgtgactgctttccattaacagttccagctctatgtgtttcctctaacgctaaaggcacagcccccgggaatctactgcttcctaagagtctccatggagtctattttacaacctcctttccctccatgcttccgcggaggagtctatactatctctatatacacattttaaacattattcttcatttgaaattccttcaataaaaacacagtcaccattcttcatcttcttgggaaatggcctgctctcgagcctctggagaagcccctctaacagctcagcccaaaaaagtgcaacaaatttacatgacacgggaaaagcaacatctattgttcttagagtctgactcccttggcccagctggaaaagtctccccacaggtgtgcagtgcagctccgcggtgctgggaaacagggctctttcaagacagcgcagggaaatcttccgggtcatctgggttgggggcaacatcttgcatctaaagaaaaaaagaaatactttgaaatccactgccccttcatccattcccgatatcccagtgggataacaagggcctggcaccaacgctgaggggcctgcattagaggcaggacccacagtgggaaggggagagtcacaggtcactgctaacccaggaaagtacagctccccctcccacacaggcctccagcctcctcgaaaaaggagctgcctcccttcctacgtcctgcaagctcttactgggggttctgcatgggcacgtccttcatcgagtaaatagaatggttactgcgtgccgggcactggaggagcacagacagtgcctatcctcggggagctcacggtgctggagaaactgaccatcgaatcaggagcttcactaacacgtcctgggaaggaggggccacaggagggccatccagtgcaatttggtggcacagtggacaccaaggtcaggcaaggttttgtgggaagagaaggttctccctgggatgaacctcaatggatgagcaaagggaacaaggacttggattgggaaacagtgtgacctgatgggggcgggggcgggccctaagggcggttctgaggtggagggatgcacaggttgtggaggtggggacagatgccagtgaagaggtgggtggcactggatctcagagtggtttcccaacacactccctggagtgctgcaggggacagagctccgctataggaaaggagtgagggtgtgtttcctatcgcagaatagaccctatttccaacctggccccaaatatacccctacaccccccgcccaaaaaattgtgtttttgctcctgcttaagcaaaaacaaaccatagacactgcttccaggggctgctccctagagcgagggaaccgggcagcaggaggagcattgccaagaccagccacagagaaggggtctgtgccatggggcctcggggctgatttccaatgaataagtgtccataccacattaggaagcacctactacatgccaggcactgcgtggcactgcgtaaaccggtaatgagcaaaagcagccgctgaccgatagccacaccagtgagaatacagccgcacacggagatcaggcttcaatgaaaagaaactcctttgctccgagaccttgatcggtctaggagatgtgatcaaagaaacctgtgaggaagtgaggctggaaggatgaatggaggccagcaggcagaggccaggggtaaggagcgtgctgtgttgagagctagaatcaggcagccttggctgaggacggtgtgaggcaggtgagccggggaggggttgaggaaggtcccctcacaaagggcttgagatcttagggaggattctgtccactctgacagcatcacctgagcccaaggcacacaatcaggccacagtaagcaaaacgtcaggtgctccagttcaatcccaagcctggggatcttgtctaatgcgggtgacagtgagtttctctctgatcccgggagtgccttcacagcagaccctggaagccagggctacagaacggtctctaggcaagatgtccatgatgctacaacaccgtccaaatgccccaacatcagtcccacactagctacagaaagaagtgactgcagaaactcatgaccctctgaaattagaccatcctgggcccagggcactgtccttattaacttctttcgccaaaccgtcaatacagacacctaccaccacttctgctctgggtccatagttctctgccctcctgatccttccccggcctccccgggtgcctcctctggctccacgcccaggacgagggaggttaccaaaattaatctccagctgggatgtgatgtcattggcgggtttccggaaaacatgggaatcgtcctcatagtcatcttttaccatctgaaacacaattacagcatcaaacacgcacaagtccacagccatccccacactcatctggcttagtggctgcagtgtgctacacaggagctaaaacaccatcaggggctagtcagagccattctctggatttgtctctggccctgggctgcagagctggacaaaggaagacagcactgctgttctgattctaagacagtgagttctgtatgttctagagtcccacattcttgcaattacaatcttaatccaaacatctttgaacttattatgatttcaagtgggaccaaatttctatcagctgagcaggttaagatataagatttggcatgactaataatagcaaacaatatacatgttttatatctaagtgtattttgctgagataaaaaagttttcatttctgcttattttctgtcttatctgttcacaaatgctttgataaataaggaaatatccccttcccagaacagaacttaacagagaaattcctttcagcatgggtgctgattataataccatgtgctaaaaatcacatgatttataataaacaattctgactcaaaatatagagaaactttataaaaacaagagtatggttacctgagtgttctaccaacactgcacaaagaagtcaagctgctttttaagaactgctttcattaaaattctatctcttgtgacagctatattaaataaattaattaaatctgatccaaatttgatttggcttcaactcataataatgggtatcacacacacacacacacaaaaaccccactttaagtaaagtaaaaacctacagaaaggaagatatgtcagtgatttcagatgagaatctccaaagtgctacaacattaaacattcctacaaccaggaaatggagcaaagtttccacgagcatatcaacacctttaggccatatgctcatgacagccttcatgtttaacatttgtgtcccctttgaggtctcaggttaaaataaagcagaggctttaggtagttggatgcttaatgctaaaaaggtgaagaaaaacagtccaggagcactggcattctgtaaaaagatacacacaaaaaatagtaacaggcaaaatactcaacccttgccttgtttggcactcagcagggaagcgctggtaaggtctccctggggtccctgctctgagtcgcctcccactgcaggaaggggcaggaagggcctcggggcagtggagcagggagtggacacagtctaaggcttgggctccacttgcagctccagctggccctggcccaagtgctttcaccgcccagtgccttacgcgaggttgttactaggtctgaactttgctaggtattctagtgcttctgcctcttcaggtgtccagaacaaagtaaactgatgaacccaagatctggcttgtgttgctttaagaacaattcctagctaaaatcttcaatcctccaagattaacaaggaccaagatgtgtgcttcactgagaccaggcttgatgactcagctaacccacttgcttcaaatattctgggagacctctggagcccgggaggacaaatctggtgtggattaagaaagagcagcttctatttttacctaacatgtcagctgcatatttcaatcctgacagcacatttgttttagagaaatttttatttacaatgcctagaacaaaaaagaacaaaggaagtggacaggttaagaaccaacccagcttgctaatggagttagaaaacacctcccagagattgccagggaaataaagctccggccgcctatgtctacaaaaagccatttcttgtggaacagctcaaaactcagtaaggcctcctacagcttggactgaccaaaacaagaggatgggagagaatcctgtatctttttttttgttttgtttggagacgaagtctcactttgttgcccaggctggagtgcaatggcgtgatctcggcttgctgcaacctctgcttcccgggttcaagcgattctcctgcctcagcctcccgagtagctgggactacaggcacccgccaaccgcccggctagtttttgtatttttagtagagacagggtttcactatgttggctaggctggtctcgaactcctgacctcaggtgatccacctgccttggcctcccaagaaccctgtatcttaaatgacacctaatcaaagtactcactcagaaaatgaaactaaccaaagtgtaaatgacaactctacaatagcataacattcctgagattccacatgaaaatcaataactaataccccacagagaggaagaacctgctacctgctcactcccacctcgaaatagtgactggtatcaagctgtagatggaatgatacagattctaaatcccataatgggaatgcttcagtggacctagccttaagttcagtaacaagtcggggacttgatgaccccatggcatccctatcaacatatgctgctagatgtttccccgaaacctctccctgcaaaactgaagcttctgagaagagctggacgtaagccgtgagcaataaggcctcacaacacggaggagctccctgagcaacccctgcagcacgctggccgctgtggcagtgcctgaccgagcagccaagcgttcggggactcatctcccgccacgtctgcagttaggcagggggcgcaaagctgctgaaccaacatgggaaaggcgtcagaagtgcatggaacctcaaccacagtttaaaaagtcatcaactactcggccaggtgcagtggctcacgcctgtaatcccagcactttagaaggctgaggctggtggatcacctgaggtcgggagttcaagaccagcctgaccaacatggaaaagccccgtctctactaaaaatacaaaattagccggggtggtggcgcatgcctgtaatcccagctacttgggaggctgaggcacgagaatcgcttgaacccgggaggcggaggttgcggtgagccaagatcgcgccactgcactccagcctgggcaacaagagcgaaactccatctcaaaaaaaaaaaaaagtcatcaactactcagtgaaatgctcttatcaagaaacagagttgaaagtaacctactcaggggacacagagtgtagttctcctttgattaactctgaattgtacaagacacaatctgtaactctcccttgagaaaaatgaaatacagttaatacacagtatgtgtacagtacccgcatagtcccagggtgagcagaagatgcactgtcactctaactgctctgtgcatctgtcaatacctcaagtttcaattccttttcttaatgaacaatacagtaaaattaggcatgcatcatctctgattagaaacaaagactgccaactactaatgttccattttcaagacagaagtggaaaggtacatttcacttccagtaaggtaaaagtaaagattacctctacatacgaaatgcaatgcttacatcatctctgtattttgacttgtgaatcaccacggctttggaaggaacagtggattctggtttccggatgttaaactcaggctttggtctggtctgttcttgaagatttttccactcatctaaagtcatctcttgaacttgggtttcttcttctacctccaactcaggaactctataaagagatatataatcataaagaatactttttgatggtactaaaatgtctactttataaagaaaaagttataaccattaattcaacatatttttgtggtactgcatttcaaatgcaaataaggtaaggaaatctttgactcacaagcttccatatttcattttcaacattttatgtcatcactgccaacagaagatacttcctatctgtgttcaaatcaatctttgaaaaatgggaacatcaccatcctgatgacattaacatcacacttcaccactggcactcccttccagacagcatgacagacaaaatgaggtaattatggacaatgggttgaaataaaatacaggaaaccataaacaagttttaaagcagtggctcatgaatgcatacttttgcaaatatcctctttaatgagttttaaaaagaaaacaaaagacagaaatatagattgagagcaaagaattcagagtccagaaataaaccctcacatttacggtcaactgattttttttttccaaccgtggtgccaaagacaattcaatggagaatgaaaagtattttcaacaaatggtgcttgggcaactggatatccacacacaccaaaagaaagaatgaagttagacctacctcacaccataaatacaagagctaaaatataaaactcttagcagaaaacctaggcagaaactttcttaaccctggactgggcaatggtttcttccacatgacaccaaaaaaacaagcaacaaaagtacatacattgaacatcatcagatacttttatactacaaaggacaccatcaagaaagtaaaaagacagtccacaaaatgggataaaatatttacaaataatatatctcacaagggacttgtatctagaatacataaagaattctttatgaacagccaagcgtggtggctcatgccgatagtcctagctactcagggggctgaggtgggaggatcgcttgaggccaggcatctgaggctgcagtgagctatgatcacacgtgtgaatggccactgtgttccaccttgggcaacagaatgagacactgtctctttaaaaaaaaaaaaaagaatgctttatgaattctagatacaagtcctctttagttgagacaaatgaccaccctccccccaaaaaaggcaaggatctgagtgaacatttttccagagaagatatacaaataggcagtaagatgttgcacatcattagctattagagaaagacaagtcaaaaccacagagctgcaccagtccacacccagtgggatggttagaaccaaaacgacatttgacaagcgttggggaggatgtggagaaactggaacccacatacactgccagtgggaatgtgaaatggtgtagcctctttggaaagcagtctggcggttcctcaaaaatctaagctgagttagcctctgacccggaaatttcactcctgggtttatacccaagagaaatgaaaacacacatccacatgaaaacttaaacccaagtgttcactgcagtgctattcataatagccaaaaagtggacacaacctaaatgtctattaactaatgagtggataaaccaaatatggcacattttttggaatattatctggcaataaaaagaaacaaagtattaatacacattacgacatgaacaaaccttgaaaaaatgatgcaagtgaaataaaccaggcagaaaagacttctgtgtatgattccatttacatgaaatattcagaggagccagattcacacagacaggaggcaggtcagtggtggccagggctgcagggagggaggatagggagtgactgctgaatgggcatggggtttccttttgggatgataacaaccttctggagccagatcatggtgatggttgcataacactctgaatgtactaaatgccactgaattgtacactttaaaaggattaaaatcgtagatttgaaaatcatcacaaaaatacacacaaaaaaagaaaaacagaaatgaagactggcacatgctacaacatgaatgaagctgaaaacttgatgctaatagttaaaataagccaggtgcaaaaggaacattgaacgattccacttagatgaggcacctagaataggcaaattcataaacacgagtaaaatagagattactacatgctgaggagaaatggggagttagtgttaaatggatatagagtttctgtttgtgatgaaaaagttctacaaggccaggcacagtggctcaagcctgtaatcctagcactttgggaggctgaggcaggcggatcatgaggtcaggagttcgagaccagcctggccaatacggtgaaaccccgtctctactaaaaaataccagaaaaattagccgggtgtagtggaatgtgcctgtagtcccagctactcaggaggctgaggcaggagaatcgcttgaacccgggaggtggaggttgcagtgagccgagatcgcaccactgcactccagcctggacaacagagtgagattccatctcaaaaaaaaaaaaaaagttctagagatggatggtggtgatggttacacacaatatgaatgttactgatgccattaaattatatatattaaaatggtaaaaatggcaatttttatgttatttttactgcaattttaaaaaattaataatgtaacataccccaaaccatccatccatgcattcagtcgtttactcatttatttgtttgatacaggctgggtttcactctgttggccaggctggagtacagtggcatgatgatggctcaccataccttcaacctcctgagcccaaggatcctcccacctcagcttcctgagagtagctgggactacaggtacgagccatcaggcccagctaatttttacaaccattttgtagagacggggtctctccatgtagcccatgctggtcttgaactcctggcctcaagctatcctcctgcctctgcctcccaaagtgttgggattacagatctgaaccaccacacctggcctatatacttagagatttgagtgctatagtacgagaattatatctcaaaagtgtttaaggggaaaaaacaggccgggcgcggtggctcacacctataatcccagcactttgggaggccgaggcaggtggatcatgaggtcaggtgttcaagaccagcctgaccaacatggtgaaaccccgtctctactaaaaatacaaaaattagctgggtgtggtggcacacgcctgtaatccctgtaatcccagctactcgggaggctgaagcaggagaattgcttgaacccgggaggcggaggttgcagtgagccaagatggcaccactgcactccagcctgggcgacagaacaagactctttctccaaaacaaaacaaaacaaaacagtaggtggggagtggggaatcaaatctgtatcttcactgaagagctgatgtaatttaaggttctattatagaaatacacagatcaatgttatgaaaaatataagcaaaatcagtagagaaacctaaccacagagcatccaaaatagacaaatttgcagtgactctacaataccaagctgatggtagaaaaaacatcaaagcaaagataacatgaaggaatatgaaagaactttctggcgtgattggtaatgttctgtattcgacaggagtttggattccacaagtacatgcatttgtcaaaacagtgaatgtacacttaagatttatacatttcatagtatatacattttatatcagaagaaaaaattgtaaacaaatattaattctatttagtgatatgcatgttgaactatttagggggaagtgtacagatgtctacaatttattatgaaatgtgtcaaaaaacatggactaatgaatacttatgtaaaatgaatatataagatataaatggtagcatttaggtagtggtaagtatagatgttcgctataaaattctttaaactttgctgtgttttgaaattttcacaataaaatgctggaaaaataccaatatcaaaatatagatctcaaatatatattggcaaaaatattaaaagatactaagacattggaacagcaaattaatggaaataacccaaacctatctagaaaagaacttggtgaaaaaactatagtatagcagctaaaaaaggaatgaggactatctgtatatactgctatggagcaccttccagagtgaatgagaaaaaagcaaggaggggtgtacagtaccttggagagccacacaaatatatatgcatagcaccgatagagatagatagtttttttgttttgttttgttttgagacagggtctcactctgtcacccaggctggagtgcggtggtatgatctctgctcactgcaacctccacctcctgggctcaagggatcctctcacttcagcctccagagtagctgggactacaggcatgcaccaccatacccagctaatttttgtattttttgtagagactgggtgggggagggtctcacttgttgcctaggctggtctcaaactcctaggctcaagcaatccacccactttggcctcccacagtgctgggattacaggcatgagccaccgcacccggccagcattttttttaaattggaatataagccaggaaaacaatagggataaaagctatttgaaaataccatgttttggctgggcacggtggctcctgtctgtaaacccagcactttgggaggccaaggccagttgatcacctgaggtcaggagatcgacacaggcctggccaacatggtgaaatcccgtctctcctaaaaatacaaaaattagctgggcatggtggcaggcacctgtaatcccagctactcgggaggctgaggcaggagaatcgctttgaacccgggaggcggaggttgcagtgaactgagattgcatcactgcactccaggctcggcaagagtgaaactccatctcaaaaagaaaaaaaaaaaatcatgtttttcagactgaactttggaaacatgtaaatattttacataattataaaacagatttaaattaaaattcaatctctaaaatttgaaagtaaaatgaatcaaagtaacctaaatgtttatgaaactggtgatataaccatcaagagaactatttcaaatgattttgaaatacaaatttgattactcatctccctcctcgacataacttttcagtaactgtgttactgaaggtaatgttggtaatgctgtgactgttttatgtgcaacaaatgattaaaagcacaatgttactcagaactagaattttcagtatgtaagaaaaggagaaacaagcagtctaggtaaaaatcccatatcttaacttcgaattggaaatattgaatgaactcatattttatcttataatgtgtatgtgtgtatttcccatctctgtccacccaaatgccctggaaacaatcaagtccctggtggcagtggttctttatcaaagcagctttactaaagaatacagatgggaaataccacacaaaaaatgctcaacattattagtcattagggaaatgcaaattaaaaccacaatgaagctagacacggtggcccacatctgtaatttcagcactcc

SEQ ID NO: 1664 - DNA, 5016 bp, Homo sapiens
cacggaacagccctcctggggtccccacgagccgcgtcctgctgtgccccggcgcctacgcagcagcggccgcggccgcggtgggcacgcacggttaccccgggcagctccggccgccagctgcagccccgtcgcctcggccgcgccagccggctgcgggcacctgggggcgggctgggggcgccggccgcggcaggaggcgctgtagcgagggctgcggcgccggtcctgcggcggccgcgggaggcagcggggcaggcgctgtgggccgggctcctcctccggctcctgcgcgaccgcctcccgccgggctctgccggcgcccgccgtccccgcagcgccgctctgcgcccgccgccccgagcgcccgcgcggggctggcgggagcctcggcgggcgcgcgggcgcgcggggccatggtcgtggccccctgacgggccgcggccgcctccatgaagcggaaaagcgagcggcggtcgagctgggccgccgcgcccccctgctcgcggcgctgctcgtcgacctcgccgggtgtgaagaagatccgcagctccacgcagcaagacccgcgccgccgggacccccaggacgacgtgtacctggacatcaccgatcgcctttgttttgccattctctacagcagaccaaagagtgcatcaaatgtacattatttcagcatagataatgaacttgaatatgagaacttctacgcagattttggaccactcaatctggcaatggtttacagatattgttgcaagatcaataagaaattaaagtccattacaatgttaaggaagaaaattgttcattttactggctctgatcagagaaaacaagcaaatgctgccttccttgttggatgctacatggttatatatttggggagaaccccagaagaagcatatagaatattaatctttggagagacatcctatattcctttcagagatgctgcctatggaagttgcaatttctacattacacttcttgactgttttcatgcagtaaagaaggcaatgcagtatggcttccttaatttcaactcatttaaccttgatgaatatgaacactatgaaaaagcagaaaatggagatttaaattggataataccagaccgatttattgccttctgtggacctcattcaagagccagacttgaaagtggttaccaccaacattctcctgagacttatattcaatattttaagaatcacaatgttactaccattattcgtctgaataaaaggatgtatgatgccaaacgctttacggatgctggcttcgatcaccatgatcttttctttgcggatggcagcacccctactgatgccattgtcaaagaattcctagatatctgtgaaaatgctgagggtgccattgcagtacattgcaaagctggccttggtcgcacgggcactctgatagcctgctacatcatgaagcattacaggatgacagcagccgagaccattgcgtgggtcaggatctgcagacctggctcggtgattgggcctcagcagcagtttttggtgatgaagcaaaccaacctctggctggaaggggactattttcgtcagaagttaaaggggcaggagaatggacaacacagagcagccttctccaaacttctctctggcgttgatgacatttccataaatggggtcgagaatcaagatcagcaagaacccgaaccgtacagtgatgatgacgaaatcaatggagtgacacaaggtgatagacttcgggccttgaaaagcagaagacaatccaaaacaaacgctattcctctcaccgatggttggctgtcccaggctgtcacctttctagaccggcttctgatctggctcgggatccacaaggactagacctgcggggaaggtctctcctggacacgcccgttgcccactgcaagttctctccaggtgcaattgaagcctctcagcagcggaggccgccatgtggagagagcaggcaggcccactgctgctgagaacagggcaggcacgggcagctcctgttctgcctttcccagcttcggagacgcaggctcagctgctccgaagcacctgccagcaccgcacagtacagtttcagaggacagcagtctccttcccgtgaagctcccatgtgctggaatggcatggacttgctgatcaacagaaggaaatggtctgaagtctgaccagcacaaggaaggaggctggctggctcagaggggcccaccttgcgtggaatgaaaacgccaaaggctcatgagcaacattaggctagaggggtcttgttcaaagcatccaactctgacttcggaggcattcccagccggcagcagtgtgtccagcctgcctcttcccaggctggtctgacatgcagcttaggctttcatcccaagttaggtactgacccctccctcttgggcagcacctccctttttaaaaaaatttttttttcttccaaagacagagtcttgctcttgttgtccaggctggagtgcagtggcgcgatctaggctcactgcaacctccttctcccaggttcaagcgactctcctgcctcagcctcctgagtagctgggattataggcgtctgccaccacgcccggctaatttctgtatttttagtagagacagggtttcaccatgttggccaggctggtctcgaactcctgacctcaagtgatctgcctgccttggcctcccaaagtgctgggattacaggtgtcagccaccgcacccagccaagcacccctatctctagaggatctggccccccagcccagttactgcagggcagctttccccacctggtgacaggctgtgcgcagcagccccaggacctcaccctgagctgagtcttcaggagccgccctggtggcacaactcagacacccctgaggcctagcagtcaactcctgattcagacatgatccagtccagcctgggcttggctataaccagctcaaacttgcttgacctccacttttcaggagacttggggacgacagccctcatcggcgtctttcatggggttaatctgcttgagtctaagtcgccagccagaaacgtggtgcccagggtgccctgcctcaggacatgtccacacccacgtcacaagcacctgaggagtccggccggggcactgtggtccaaaaggtcctgccgcctccgcatctgactgtcccaacggcatgctggtgacacccccctgcccttcgcttctgtcctccctggcttctctggggcacttggggctatgtacaacctggcacgatccagaaagggtgcaaacaaaatgcctacatccaggcacacgaccaagtcagcgagagctagccctggtaagcaaacatagcccattacaggttcagaacgtgcaccgggttccccaaaactgtcttcaaccacatgactcaacagctctatgggataggaactgtcagtgtttttgcaactgcaacattaaaccaagtgctgtgggcttttcaagtattattcacaacactaaaggaaagtttcttcaaagggctctctggctaatcttcaaagccgcagttaggcaaaatgacagtgtgacagcttcaaagccactgactcatgacacagccctgatgttgtaccggctaggttcagatttcagaaatcagggcacttgcatccattgccttttccaggaaagggaagaaaacactcagttgataaaccttagtactcagataataaataagagaccaaaagtaggctatcacccaaagcaaacatccttaactgaccctaacgtgtatggattcaactttgattattcaacaaaatcatgaccgactgctgtggcctggagtaaccaaaggactgttttctctacacaaagtcaggagcgaataccaacctttatttgcacttgggttccagttcaaagccaccttagacagtgtggcaaagtgggaaaaagcacagatcctgggaccaaggttcagattccatctcaagcgagcatatgaactgtgtgacaacaggcagacagtacctctgtgtctatgagaaagcggggagagcaacaccccagcttctagcagctctacagctgcctggacctgcaggccctcctaggcccacttcctccccagcacagtgtgtgttcccgggcgtgtgtggctctgggtccagctctgttcagggtgggactccaggtgaattactgaacctctgaggtgtacccccaaccccaaactttcaccaaaagcaataaagaggaactctagaactggagccaggactaagtgagaaaaactgcttataagtgcttaataaatactagttatttacaacttttgctcaagccgagggcagaggcctttgtacgcagctgccgaactctgactctagttctgcggaagaaaaggatgcggtatttgcttttgccatgatccctttccatttgattggcaggttaaataacatggtttttgaagtcacatacttaatattcttcctaaaaaccacccaaacactagatgtgtgtgtgcacacacacagaaaccacgaggtagtttaaatcaccattaaaaatcaacgctttctctgattctgtgtcacagagtggtggccagtggctacacaatagcgatttttaaatgattggttaagtgaaaaccagaactcaaaatattccaggagagaagataacatttacaagtaaacagtaagtgcaattgtattttaatttcttggtctccgaaaactcagctgtgactgctttccattaacagttccagctctatgtgtttcctctaacgctaaaggcacagcccccgggaatctactgcttcctaagagtctccatggagtctattttacaacctcctttccctccatgcttccgcggaggagtctatactatctctatatacacattttaaacattattcttcatttgaaattccttcaataaaaacacagtcaccattcttcatcttcttgggaaatggcctgctctcgagcctctggagaagcccctctaaca

SEQ ID NO: 1665 - protein, 465 aa, Homo sapiens
MKRKSRSSWAAAPPCSRRCSSTSPGVKKIRSSTQQDPRRRDPQDDVYLDITDRLCFAIKRPKSNVHYFSIDNELEYENFYADFGPLNLAMVYRYCCKINKKLKSITMLRKKIVHFTGSDQRKQANAAFLVGCYMVIYLGRTPEEAYRILIFGETSYIPFRDAAYGSCNFYITLLDCFHAVKKAMQYGFLNFNSFNLDEYEHYEKAENGDLNWIIPDRFIAFCGPHSRARLESGYHQHSPETYIQYFKNHNVTTIIRLNKRMYDAKRFTDAGFDHHDLFFADGSTPTDAIVKEFLDICENAEGAIAVHCKAGLGRTGTLIACYIMKHYRMTAAETIAWVRICRPGSVIGPQQQFLVMKQTNLWLEGDYFRQKLKGQENGQHRAAFSKLLSGVDDISINGVENQDQQEPEPYSDDDEINGVTQGDRLRALKSRRQSKTNAIPLTDGWLSQAVTFLDRLLIWLGIHKD

SEQ ID NO: 1666 - DNA, 3298 bp, Homo sapiens
cacggaacagccctcctggggtccccacgagccgcgtcctgctgtgccccggcgcctacgcagcagcggccgcggccgcggtgggcacgcacggttaccccgggcagctccggccgccagctgcagccccgtcgcctcggccgcgccagccggctgcgggcacctgggggcgggctgggggcgccggccgcggcaggaggcgctgtagcgagggctgcggcgccggtcctgcggcggccgcgggaggcagcggggcaggcgctgtgggccgggctcctcctccggctcctgcgcgaccgcctcccgccgggctctgccggcgcccgccgtccccgcagcgccgctctgcgcccgccgccccgagcgcccgcgcggggctggcgggagcctcggcgggcgcgcgggcgcgcggggccatggtcgtggccccctgacgggccgcggccgcctccatgaagcggaaaagcgagcggcggtcgagctgggccgccgcgcccccctgctcgcggcgctgctcgtcgacctcgccgggtgtgaagaagatccgcagctccacgcagcaagacccgcgccgccgggacccccaggacgacgtgtacctggacatcaccgatcgcctttgttttgccattctctacagcagaccaaagagtgcatcaaatgtacattatttcagcatagataatgaacttgaatatgagaacttctacgcagattttggaccactcaatctggcaatggtttacagatattgttgcaagatcaataagaaattaaagtccattacaatgttaaggaagaaaattgttcattttactggctctgatcagagaaaacaagcaaatgctgccttccttgttggatgctacatggttatatatttggggagaaccccagaagaagcatatagaatattaatctttggagagacatcctatattcctttcagagatgctgcctatggaagttgcaatttctacattacacttcttgactgttttcatgcagtaaagaaggcaatgcagtatggcttccttaatttcaactcatttaaccttgatgaatatgaacactatgaaaaagcagaaaatggagatttaaattggataataccagaccgatttattgccttctgtggacctcattcaagagccagacttgaaagtggttaccaccaacattctcctgagacttatattcaatattttaagaatcacaatgttactaccattattcgtctgaataaaaggatgtatgatgccaaacgctttacggatgctggcttcgatcaccatgatcttttctttgcggatggcagcacccctactgatgccattgtcaaagaattcctagatatctgtgaaaatgctgagggtgccattgcagtacattgcaaagctggccttggtcgcacgggcactctgatagcctgctacatcatgaagcattacaggatgacagcagccgagaccattgcgtgggtcaggatctgcagacctggctcggtgattgggcctcagcagcagtttttggtgatgaagcaaaccaacctctggctggaaggggactattttcgtcagaagttaaaggggcaggagaatggacaacacagagcagccttctccaaacttctctctggcgttgatgacatttccataaatggggtcgagaatcaagatcagcaagaacccgaaccgtacagtgatgatgacgaaatcaatggagtgacacaaggtgatagacttcgggccttgaaaagcagaagacaatccaaaacaaacgctattcctctcactctctccatttcaaggactaaaacagtcttgcgttaagtaaaaacctgtgaccagagctgaaggaagactctaggactgaaaactgcaacagaaattagcacaatttgaaaacaaaacaaaattgcaaaagccttagttgctttttccacctaagaagttgatcaatggagaaaatgtccactggagtttgaataatgaactttgagtttgggtgcaagcaaatgactcagagaagggtccagctctcaagctgaatgacaaacatgctgttgtaaatttagtctcaggtgtaaatacccaagccctctggtacccagggagctggctggtctgtggtgcatgtgtgtccctgtgatggcaatcattgtagttgctggccttcagaagaattgaggatctgatggaggttttttatgtatttattttctgttcaccttgtgaccctgtgtcaaaatttataaagatacaaaaggcattactgaaatggtactttctgtaatttgatactatttggcttaatcatcttcacttgactatttgtaatactgttgtaatgttaactctgttaagtacccaagctgcttgtcttccaccaaagagtgctttattaacaagaatctgtgaaaatcacatttaaacactgttgcatgttgtaagaccaggtggtaccttagtaacctaaaacttgcaagagaatattaatggtagctttagaagactcaggaggagaaactgacttcagagttggaagatgttgcaagtcgttcctttttctgtccttcagggactgaagaactgggaggctgcccattgtttggttgccagtcatacaaattaaaatcatatttccttccatgaatggaagaaacacactattggtttttccccttggaaacagcaatcccaaataatgtcggcttacaaaaaaaaaaagttaccacttttttagagtccttccctgtaacattggattttttttttcccttatgagatccacctaaggccattgacgtggcctgcgatctcagtgacaatgatctgcttctggatctcactgttgcctttggttagggaacacaactaagtgccttctcccgcagccctactggaacacagcagagtctgtgccatgaagcagttacagaaacagaattgatgtgctgctaaaaaaaaaaaaaaaatggggcccgaaataaaagaatatatagtactcacctcagttccttccataagaagtgggtggtttaatgattgttaagccatttttgcctgtgccgggagcatggagggctgagatgtcgacaggcagtgggaaacaaatgccctcctaagccacaaggcgtgcgccagattagtaggcaactccattttaagaagctgcctttttcacaaaactggaagaaataaaagcggttggaataaacaagttaaaagtctttaatgcaaaaagtaattgaaaggcagtgcctccattttggtgtactttcttggaagaaagtata

SEQ ID NO: 1667 - protein, 453 aa, Homo sapiens
MKRKSRSSWAAAPPCSRRCSSTSPGVKKIRSSTQQDPRRRDPQDDVYLDITDRLCFAIKRPKSNVHYFSIDNELEYENFYADFGPLNLAMVYRYCCKINKKLKSITMLRKKIVHFTGSDQRKQANAAFLVGCYMVIYLGRTPEEAYRILIFGETSYIPFRDAAYGSCNFYITLLDCFHAVKKAMQYGFLNFNSFNLDEYEHYEKAENGDLNWIIPDRFIAFCGPHSRARLESGYHQHSPETYIQYFKNHNVTTIIRLNKRMYDAKRFTDAGFDHHDLFFADGSTPTDAIVKEFLDICENAEGAIAVHCKAGLGRTGTLIACYIMKHYRMTAAETIAWVRICRPGSVIGPQQQFLVMKQTNLWLEGDYFRQKLKGQENGQHRAAFSKLLSGVDDISINGVENQDQQEPEPYSDDDEINGVTQGDRLRALKSRRQSKTNAIPLTLSISRTKTVLR

SEQ ID NO: 1668 - DNA, 5586 bp, Homo sapiens
cacggaacagccctcctggggtccccacgagccgcgtcctgctgtgccccggcgcctacgcagcagcggccgcggccgcggtgggcacgcacggttaccccgggcagctccggccgccagctgcagccccgtcgcctcggccgcgccagccggctgcgggcacctgggggcgggctgggggcgccggccgcggcaggaggcgctgtagcgagggctgcggcgccggtcctgcggcggccgcgggaggcagcggggcaggcgctgtgggccgggctcctcctccggctcctgcgcgaccgcctcccgccgggctctgccggcgcccgccgtccccgcagcgccgctctgcgcccgccgccccgagcgcccgcgcggggctggcgggagcctcggcgggcgcgcgggcgcgcggggccatggtcgtggccccctgacgggccgcggccgcctccatgaagcggaaaagcgagcggcggtcgagctgggccgccgcgcccccctgctcgcggcgctgctcgtcgacctcgccgggtgtgaagaagatccgcagctccacgcagcaagacccgcgccgccgggacccccaggacgacgtgtacctggacatcaccgatcgcctttgttttgccattctctacagcagaccaaagagtgcatcaaatgtacattatttcagcatagataatgaacttgaatatgagaacttctacgcagattttggaccactcaatctggcaatggtttacagatattgttgcaagatcaataagaaattaaagtccattacaatgttaaggaagaaaattgttcattttactggctctgatcagagaaaacaagcaaatgctgccttccttgttggatgctacatggttatatatttggggagaaccccagaagaagcatatagaatattaatctttggagagacatcctatattcctttcagagatgctgcctatggaagttgcaatttctacattacacttcttgactgttttcatgcagtaaagaaggcaatgcagtatggcttccttaatttcaactcatttaaccttgatgaatatgaacactatgaaaaagcagaaaatggagatttaaattggataataccagaccgatttattgccttctgtggacctcattcaagagccagacttgaaagtggttaccaccaacattctcctgagacttatattcaatattttaagaatcacaatgttactaccattattcgtctgaataaaaggatgtatgatgccaaacgctttacggatgctggcttcgatcaccatgatcttttctttgcggatggcagcacccctactgatgccattgtcaaagaattcctagatatctgtgaaaatgctgagggtgccattgcagtacattgcaaagctggccttggtcgcacgggcactctgatagcctgctacatcatgaagcattacaggatgacagcagccgagaccattgcgtgggtcaggatctgcagacctggctcggtgattgggcctcagcagcagtttttggtgatgaagcaaaccaacctctggctggaaggggactattttcgtcagaagttaaaggggcaggagaatggacaacacagagcagccttctccaaacttctctctggcgttgatgacatttccataaatggggtcgagaatcaagatcagcaagaacccgaaccgtacagtgatgatgacgaaatcaatggagtgacacaaggtgatagacttcgggccttgaaaagcagaagacaatccaaaacaaacgctattcctctcacagtaattcttcaatccagtgttcagagctgtaaaacatctgaacctaacatttctggcagtgcaggcattactaaaagaaccaccagatctgcttcaaggaaaagcagtgttaaaagtctctccatttcaaggactaaaacagtcttgcgttaagtaaaaacctgtgaccagagctgaaggaagactctaggactgaaaactgcaacagaaattagcacaatttgaaaacaaaacaaaattgcaaaagccttagttgctttttccacctaagaagttgatcaatggagaaaatgtccactggagtttgaataatgaactttgagtttgggtgcaagcaaatgactcagagaagggtccagctctcaagctgaatgacaaacatgctgttgtaaatttagtctcaggtgtaaatacccaagccctctggtacccagggagctggctggtctgtggtgcatgtgtgtccctgtgatggcaatcattgtagttgctggccttcagaagaattgaggatctgatggaggttttttatgtatttattttctgttcaccttgtgaccctgtgtcaaaatttataaagatacaaaaggcattactgaaatggtactttctgtaatttgatactatttggcttaatcatcttcacttgactatttgtaatactgttgtaatgttaactctgttaagtacccaagctgcttgtcttccaccaaagagtgctttattaacaagaatctgtgaaaatcacatttaaacactgttgcatgttgtaagaccaggtggtaccttagtaacctaaaacttgcaagagaatattaatggtagctttagaagactcaggaggagaaactgacttcagagttggaagatgttgcaagtcgttcctttttctgtccttcagggactgaagaactgggaggctgcccattgtttggttgccagtcatacaaattaaaatcatatttccttccatgaatggaagaaacacactattggtttttccccttggaaacagcaatcccaaataatgtcggcttacaaaaaaaaaaagttaccacttttttagagtccttccctgtaacattggattttttttttcccttatgagatccacctaaggccattgacgtggcctgcgatctcagtgacaatgatctgcttctggatctcactgttgcctttggttagggaacacaactagtaactctgcagagtgccttctcccgcagccctactggaacacagcagagtctgtgccatgaagcagttacagaaacagaattgatgtgctgctaaaaaaaaaaaaaaaatggggcccgaaataaaagaatatatagtactcacctcagttccttccataagaagtgggtggtttaatgattgttaagccatttttgcctgtgccgggagcatggagggctgagatgtcgacaggcagtgggaaacaaatgccctcctaagccacaaggcgtgcgccagattagtaggcaactccattttaagaagctgcctttttcacaaaactggaagaaataaaagcggttggaataaacaagttaaaagtctttaatgcaaaaagtaattgaaaggcagtgcctccattttggtgtactttcttggaagaaagtataaaattgaccggcatcatgagagacggaagatgccgtgttctcagccaaacaagcaactctttccccgccaggcactgtcgggtggggtcaggccagcttttaaacactggggactggatcacagaaaaacagtggttttctgtccctggaaatgaataggcacaaagacccacttggctgtgggcagactactcttcaataagatttgggtgggaggaggaacattccttttgctattttgagctgagacaatataaatattcaaactgtgccatgcataaagcattgaattctcagggcacctcttcttccccttaccccttttaaggccatcccctccattaataataatccaggtagttgtgaaaatcgtgcttctatctgatcccttcttagtttggcttttcatcccatcagaacaagtaaacgtaggcgccacagctcttgtgagtactgtctccctcacggtgaatgagcctcctggtgtttcgtccaagaaaagaaagggtgtcactggaaccacagccctttttcattttataaactgcctcttcatgttgcctgctcaagtttccacctagaattgctatcactgtggctctttctaaaaatctttctatttaactggttcactgaaattagtcatagaaaacttgtgatttggtgaagaggcattccttgtaataaccaaatgacttgggatggtgtgcatagcaagggcagtgttacacttatgaggactgtctctagcatccaggaagtctctgggtctgagggatggaaagttcttcctgctatgaatgagagtggactcttcccctcacccccaactgaaaccacaaacaaccagaatcttctggaattctgacttagagtcgttgttatagaagaccttgttgctatggaacatgaaactgtgtgtcagatggagagatccccttaacctaagagccttaaatagccctgaaagtacactgggacggtttgcgatggaattaaaattggaagtgaatatttttaggtgctcttgaagctttctggggactcaaaattatcaaaagtcagggacagtccggaggaagagcgtctgcaaaactgggttcctagaagtatagacggacttagctttttgtagaatttggtgaggagcagcgcctcgtgagagcagaatggcctggcgtggccagtgcttcccggcagcacgcagctctgcggcctccagaattcccctgttctgagcttgatgcccctagcctgtcccctacctacttcctcccctcctctctagccctctcacaggggtgattgctacctctctgttttcttgggcctaggcaagttttagaggagttcccaagcattgttatgaggccagtgtgctcgctgggctgggcgggatggcctgggcttgtgtgtggcctgagggctctcctggggccttctcttttcccagtcacctttggagccacagaagcagtgcactcattggatgtctgttcttaacacagcttctctttctacattaaaaaaaatcattattgcattttggaaagcagtgctcatcaaaagcaacttttaaaacctattttattgttcctttaaatgttctctcccgctgaaactgccctggagaggctatctgctgctcttccatttacccacatcaggttattctccatgtcactcagtggagatgactccagatgtgtttaaagactggacaattcacctatactgtgtaggaaattacctccttaattacctggtagaattgtcagcagacatgttcatccgatgatagtactgcagttttctattaataatttgcagacttttatctaacctgcactcatgtacagattattaaaagttttaaaatgtaactgatcagtattgatcaatcattgtcttgatttttttttacagcgtatatttctaatcatattttttaaagccaagagaactggttgaatgaatgtttattttcctgaaggtatttttaagataaagcttcctaatggcgtgtaaactttgcatatgtatgtagtttgatacatattgtcacatttgaaaatcttgtgggttgtaactggttttatacaaaatatcgaatagtggaaattgtataattacaatcatgtaattaaaagtattaaccc

SEQ ID NO: 1669 - protein, 492 aa, Homo sapiens
MKRKSRSSWAAAPPCSRRCSSTSPGVKKIRSSTQQDPRRRDPQDDVYLDITDRLCFAIKRPKSNVHYFSIDNELEYENFYADFGPLNLAMVYRYCCKINKKLKSITMLRKKIVHFTGSDQRKQANAAFLVGCYMVIYLGRTPEEAYRILIFGETSYIPFRDAAYGSCNFYITLLDCFHAVKKAMQYGFLNFNSFNLDEYEHYEKAENGDLNWIIPDRFIAFCGPHSRARLESGYHQHSPETYIQYFKNHNVTTIIRLNKRMYDAKRFTDAGFDHHDLFFADGSTPTDAIVKEFLDICENAEGAIAVHCKAGLGRTGTLIACYIMKHYRMTAAETIAWVRICRPGSVIGPQQQFLVMKQTNLWLEGDYFRQKLKGQENGQHRAAFSKLLSGVDDISINGVENQDQQEPEPYSDDDEINGVTQGDRLRALKSRRQSKTNAIPLTVILQSSVQSCKTSEPNISGSAGITKRTTRSASRKSSVKSLSISRTKTVLR

SEQ ID NO: 1670 - DNA, 5226 bp, Homo sapiens
cacggaacagccctcctggggtccccacgagccgcgtcctgctgtgccccggcgcctacgcagcagcggccgcggccgcggtgggcacgcacggttaccccgggcagctccggccgccagctgcagccccgtcgcctcggccgcgccagccggctgcgggcacctgggggcgggctgggggcgccggccgcggcaggaggcgctgtagcgagggctgcggcgccggtcctgcggcggccgcgggaggcagcggggcaggcgctgtgggccgggctcctcctccggctcctgcgcgaccgcctcccgccgggctctgccggcgcccgccgtccccgcagcgccgctctgcgcccgccgccccgagcgcccgcgcggggctggcgggagcctcggcgggcgcgcgggcgcgcggggccatggtcgtggccccctgacgggccgcggccgcctccatgaagcggaaaagcgagcggcggtcgagctgggccgccgcgcccccctgctcgcggcgctgctcgtcgacctcgccgggtgtgaagaagatccgcagctccacgcagcaagacccgcgccgccgggacccccaggacgacgtgtacctggacatcaccgatcgcctttgttttgccattctctacagcagaccaaagagtgcatcaaatgtacattatttcagcatagataatgaacttgaatatgagaacttctacgcagattttggaccactcaatctggcaatggtttacagatattgttgcaagatcaataagaaattaaagtccattacaatgttaaggaagaaaattgttcattttactggctctgatcagagaaaacaagcaaatgctgccttccttgttggatgctacatggttatatatttggggagaaccccagaagaagcatatagaatattaatctttggagagacatcctatattcctttcagagatgctgcctatggaagttgcaatttctacattacacttcttgactgttttcatgcagtaaagaaggcaatgcagtatggcttccttaatttcaactcatttaaccttgatgaatatgaacactatgaaaaagcagaaaatggagatttaaattggataataccagaccgatttattgccttctgtggacctcattcaagagccagacttgaaagtggttaccaccaacattctcctgagacttatattcaatattttaagaatcacaatgttactaccattattcgtctgaataaaaggatgtatgatgccaaacgctttacggatgctggcttcgatcaccatgatcttttctttgcggatggcagcacccctactgatgccattgtcaaagaattcctagatatctgtgaaaatgctgagggtgccattgcagtacattgcaaagctggccttggtcgcacgggcactctgatagcctgctacatcatgaagcattacaggatgacagcagccgagaccattgcgtgggtcaggatctgcagacctggctcggtgattgggcctcagcagcagtttttggtgatgaagcaaaccaacctctggctggaaggggactattttcgtcagaagttaaaggggcaggagaatggacaacacagagcagccttctccaaacttctctctggcgttgatgacatttccataaatggggtcgagaatcaagatcagcaagaacccgaaccgtacagtgatgatgacgaaatcaatggagtgacacaaggtgatagacttcgggccttgaaaagcagaagacaatccaaaacaaacgctattcctctcaccgatggttggctgtcccaggctgtcacctttctagaccggcttctgatctggctcgggatccacaaggactagacctgcggggaaggtctctcctggacacgcccgttgcccactgcaagttctctccaggtgcaattgaagcctctcagcagcggaggccgccatgtggagagagcaggcaggcccactgctgctgagaacagggcaggcacgggcagctcctgttctgcctttcccagcttcggagacgcaggctcagctgctccgaagcacctgccagcaccgcacagtacagtttcagaggacagcagtctccttcccgtgaagctcccatgtgctggaatggcatggacttgctgatcaacagaaggaaatggtctgaagtctgaccagcacaaggaaggaggctggctggctcagaggggcccaccttgcgtggaatgaaaacgccaaaggctcatgagcaacattaggctagaggggtcttgttcaaagcatccaactctgacttcggaggcattcccagccggcagcagtgtgtccagcctgcctcttcccaggctggtctgacatgcagcttaggctttcatcccaagttaggtactgacccctccctcttgggcagcacctccctttttaaaaaaatttttttttcttccaaagacagagtcttgctcttgttgtccaggctggagtgcagtggcgcgatctaggctcactgcaacctccttctcccaggttcaagcgactctcctgcctcagcctcctgagtagctgggattataggcgtctgccaccacgcccggctaatttctgtatttttagtagagacagggtttcaccatgttggccaggctggtctcgaactcctgacctcaagtgatctgcctgccttggcctcccaaagtgctgggattacaggtgtcagccaccgcacccagccaagcacccctatctctagaggatctggccccccagcccagttactgcagggcagctttccccacctggtgacaggctgtgcgcagcagccccaggacctcaccctgagctgagtcttcaggagccgccctggtggcacaactcagacacccctgaggcctagcagtcaactcctgattcagacatgatccagtccagcctgggcttggctataaccagctcaaacttgcttgacctccacttttcaggagacttggggacgacagccctcatcggcgtctttcatggggttaatctgcttgagtctaagtcgccagccagaaacgtggtgcccagggtgccctgcctcaggacatgtccacacccacgtcacaagcacctgaggagtccggccggggcactgtggtccaaaaggtcctgccgcctccgcatctgactgtcccaacggcatgctggtgacacccccctgcccttcgcttctgtcctccctggcttctctggggcacttggggctatgtacaacctggcacgatccagaaagggtgcaaacaaaatgcctacatccaggcacacgaccaagtcagcgagagctagccctggtaagcaaacatagcccattacaggttcagaacgtgcaccgggttccccaaaactgtcttcaaccacatgactcaacagctctatgggataggaactgtcagtgtttttgcaactgcaacattaaaccaagtgctgtgggcttttcaagtattattcacaacactaaaggaaagtttcttcaaagggctctctggctaatcttcaaagccgcagttaggcaaaatgacagtgtgacagcttcaaagccactgactcatgacacagccctgatgttgtaccggctaggttcagatttcagaaatcagggcacttgcatccattgccttttccaggaaagggaagaaaacactcagttgataaaccttagtactcagataataaataagagaccaaaagtaggctatcacccaaagcaaacatccttaactgaccctaacgtgtatggattcaactttgattattcaacaaaatcatgaccgactgctgtggcctggagtaaccaaaggactgttttctctacacaaagtcaggagcgaataccaacctttatttgcacttgggttccagttcaaagccaccttagacagtgtggcaaagtgggaaaaagcacagatcctgggaccaaggttcagattccatctcaagcgagcatatgaactgtgtgacaacaggcagacagtacctctgtgtctatgagaaagcggggagagcaacaccccagcttctagcagctctacagctgcctggacctgcaggccctcctaggcccacttcctccccagcacagtgtgtgttcccgggcgtgtgtggctctgggtccagctctgttcagggtgggactccaggtgaattactgaacctctgaggtgtacccccaaccccaaactttcaccaaaagcaataaagaggaactctagaactggagccaggactaagtgagaaaaactgcttataagtgcttaataaatactagttatttacaacttttgctcaagccgagggcagaggcctttgtacgcagctgccgaactctgactctagttctgcggaagaaaaggatgcggtatttgcttttgccatgatccctttccatttgattggcaggttaaataacatggtttttgaagtcacatacttaatattcttcctaaaaaccacccaaacactagatgtgtgtgtgcacacacacagaaaccacgaggtagtttaaatcaccattaaaaatcaacgctttctctgattctgtgtcacagagtggtggccagtggctacacaatagcgatttttaaatgattggttaagtgaaaaccagaactcaaaatattccaggagagaagataacatttacaagtaaacagtaagtgcaattgtattttaatttcttggtctccgaaaactcagctgtgactgctttccattaacagttccagctctatgtgtttcctctaacgctaaaggcacagcccccgggaatctactgcttcctaagagtctccatggagtctattttacaacctcctttccctccatgcttccgcggaggagtctatactatctctatatacacattttaaacattattcttcatttgaaattccttcaataaaaacacagtcaccattcttcatcttcttgggaaatggcctgctctcgagcctctggagaagcccctctaacacaggaggagcattgccaagaccagccacagagaaggggtctgtgccatggggcctcggggctgatttccaatgaataagtgtccataccacattaggaagcacctactacatgccaggcactgcgtggcactgcgtaaaccggtaatgagcaaaagcagccgctgaccgatagccacaccagtgagaatacagccgcacacggagatcag

SEQ ID NO: 1671 - protein, 465 aa, Homo sapiens; identical to SEQ ID NO: 1665

SEQ ID NO: 1672 - DNA, 4495 bp, Homo sapiens
cacggaacagccctcctggggtccccacgagccgcgtcctgctgtgccccggcgcctacgcagcagcggccgcggccgcggtgggcacgcacggttaccccgggcagctccggccgccagctgcagccccgtcgcctcggccgcgccagccggctgcgggcacctgggggcgggctgggggcgccggccgcggcaggaggcgctgtagcgagggctgcggcgccggtcctgcggcggccgcgggaggcagcggggcaggcgctgtgggccgggctcctcctccggctcctgcgcgaccgcctcccgccgggctctgccggcgcccgccgtccccgcagcgccgctctgcgcccgccgccccgagcgcccgcgcggggctggcgggagcctcggcgggcgcgcgggcgcgcggggccatggtcgtggccccctgacgggccgcggccgcctccatgaagcggaaaagcgagcggcggtcgagctgggccgccgcgcccccctgctcgcggcgctgctcgtcgacctcgccgggtgtgaagaagatccgcagctccacgcagcaagacccgcgccgccgggacccccaggacgacgtgtacctggacatcaccgatcgcctttgttttgccattctctacagcagaccaaagagtgcatcaaatgtacattatttcagcatagataatgaacttgaatatgagaacttctacgcagattttggaccactcaatctggcaatggtttacagatattgttgcaagatcaataagaaattaaagtccattacaatgttaaggaagaaaattgttcattttactggctctgatcagagaaaacaagcaaatgctgccttccttgttggatgctacatggttatatatttggggagaaccccagaagaagcatatagaatattaatctttggagagacatcctatattcctttcagagatgctgcctatggaagttgcaatttctacattacacttcttgactgttttcatgcagtaaagaaggcaatgcagtatggcttccttaatttcaactcatttaaccttgatgaatatgaacactatgaaaaagcagaaaatggagatttaaattggataataccagaccgatttattgccttctgtggacctcattcaagagccagacttgaaagtggttaccaccaacattctcctgagacttatattcaatattttaagaatcacaatgttactaccattattcgtctgaataaaaggatgtatgatgccaaacgctttacggatgctggcttcgatcaccatgatcttttctttgcggatggcagcacccctactgatgccattgtcaaagaattcctagatatctgtgaaaatgctgagggtgccattgcagtacattgcaaagctggccttggtcgcacgggcactctgatagcctgctacatcatgaagcattacaggatgacagcagccgagaccattgcgtgggtcaggatctgcagacctggctcggtgattgggcctcagcagcagtttttggtgatgaagcaaaccaacctctggctggaaggggactattttcgtcagaagttaaaggggcaggagaatggacaacacagagcagccttctccaaacttctctctggcgttgatgacatttccataaatggggtcgagaatcaagatcagcaagaacccgaaccgtacagtgatgatgacgaaatcaatggagtgacacaaggtgatagacttcgggccttgaaaagcagaagacaatccaaaacaaacgctattcctctcacatgtcccctagctgtgctgacctctgcactgtgtagtgttgtcatctggtggattgtttgtgactacattcttcccatcctgctattctgtctcgatggtttcagaacacagactaaaacagtcttgcgttaagtaaaaacctgtgaccagagctgaaggaagactctaggactgaaaactgcaacagaaattagcacaatttgaaaacaaaacaaaattgcaaaagccttagttgctttttccacctaagaagttgatcaatggagaaaatgtccactggagtttgaataatgaactttgagtttgggtgcaagcaaatgactcagagaagggtccagctctcaagctgaatgacaaacatgctgttgtaaatttagtctcaggtgtaaatacccaagccctctggtacccagggagctggctggtctgtggtgcatgtgtgtccctgtgatggcaatcattgtagttgctggccttcagaagaattgaggatctgatggaggttttttatgtatttattttctgttcaccttgtgaccctgtgtcaaaatttataaagatacaaaaggcattactgaaatggtactttctgtaatttgatactatttggcttaatcatcttcacttgactatttgtaatactgttgtaatgttaactctgttaagtacccaagctgcttgtcttccaccaaagagtgctttattaacaagaatctgtgaaaatcacatttaaacactgttgcatgttgtaagaccaggtggtaccttagtaacctaaaacttgcaagagaatattaatggtagctttagaagactcaggaggagaaactgacttcagagttggaagatgttgcaagtcgttcctttttctgtccttcagggactgaagaactgggaggctgcccattgtttggttgccagtcatacaaattaaaatcatatttccttccatgaatggaagaaacacactattggtttttccccttggaaacagcaatcccaaataatgtcggcttacaaaaaaaaaaagttaccacttttttagagtccttccctgtaacattggattttttttttcccttatgagatccacctaaggccattgacgtggcctgcgatctcagtgacaatgatctgcttctggatctcactgttgcctttggttagggaacacaactagtaactctgcagagtgccttctcccgcagccctactggaacacagcagagtctgtgccatgaagcagttacagaaacagaattgatgtgctgctaaaaaaaaaaaaaaaatggggcccgaaataaaagaatatatagtactcacctcagttccttccataagaagtgggtggtttaatgattgttaagccatttttgcctgtgccgggagcatggagggctgagatgtcgacaggcagtgggaaacaaatgccctcctaagccacaaggcgtgcgccagattagtaggcaactccattttaagaagctgcctttttcacaaaactggaagaaataaaagcggttggaataaacaagttaaaagtctttaatgcaaaaagtaattgaaaggcagtgcctccattttggtgtactttcttggaagaaagtataaaattgaccggcatcatgagagacggaagatgccgtgttctcagccaaacaagcaactctttccccgccaggcactgtcgggtggggtcaggccagcttttaaacactggggactggatcacagaaaaacagtggttttctgtccctggaaatgaataggcacaaagacccacttggctgtgggcagactactcttcaataagatttgggtgggaggaggaacattccttttgctattttgagctgagacaatataaatattcaaactgtgccatgcataaagcattgaattctcagggcacctcttcttccccttaccccttttaaggccatcccctccattaataataatccaggtagttgtgaaaatcgtgcttctatctgatcccttcttagtttggcttttcatcccatcagaacaagtaaacgtaggcgccacagctcttgtgagtactgtctccctcacggtgaatgagcctcctggtgtttcgtccaagaaaagaaagggtgtcactggaaccacagccctttttcattttataaactgcctcttcatgttgcctgctcaagtttccacctagaattgctatcactgtggctctttctaaaaatctttctatttaactggttcactgaaattagtcatagaaaacttgtgatttggtgaagaggcattccttgtaataaccaaatgacttgggatggtgtgcatagcaagggcagtgttacacttatgaggactgtctctagcatccaggaagtctctgggtctgagggatggaaagttcttcctgctatgaatgagagtggactcttcccctcacccccaactgaaaccacaaacaaccagaatcttctggaattctgacttagagtcgttgttatagaagaccttgttgctatggaacatgaaactgtgtgtcagatggagagatccccttaacctaagagccttaaatagccctgaaagtacactgggacggtttgcgatggaattaaaattggaagtgaatatttttaggtgctcttgaagctttctggggactcaaaattatcaaaagtcagggacagtccggaggaagagcgtct

SEQ ID NO: 1673 - protein, 485 aa, Homo sapiens
MKRKSRSSWAAAPPCSRRCSSTSPGVKKIRSSTQQDPRRRDPQDDVYLDITDRLCFAIKRPKSNVHYFSIDNELEYENFYADFGPLNLAMVYRYCCKINKKLKSITMLRKKIVHFTGSDQRKQANAAFLVGCYMVIYLGRTPEEAYRILIFGETSYIPFRDAAYGSCNFYITLLDCFHAVKKAMQYGFLNFNSFNLDEYEHYEKAENGDLNWIIPDRFIAFCGPHSRARLESGYHQHSPETYIQYFKNHNVTTIIRLNKRMYDAKRFTDAGFDHHDLFFADGSTPTDAIVKEFLDICENAEGAIAVHCKAGLGRTGTLIACYIMKHYRMTAAETIAWVRICRPGSVIGPQQQFLVMKQTNLWLEGDYFRQKLKGQENGQHRAAFSKLLSGVDDISINGVENQDQQEPEPYSDDDEINGVTQGDRLRALKSRRQSKTNAIPLTCPLAVLTSALCSVVIWWIVCDYILPILLFCLDGFRTQTKTVLR

SEQ ID NO: 1674 - DNA, 5592 bp, Homo sapiens
cacggaacagccctcctggggtccccacgagccgcgtcctgctgtgccccggcgcctacgcagcagcggccgcggccgcggtgggcacgcacggttaccccgggcagctccggccgccagctgcagccccgtcgcctcggccgcgccagccggctgcgggcacctgggggcgggctgggggcgccggccgcggcaggaggcgctgtagcgagggctgcggcgccggtcctgcggcggccgcgggaggcagcggggcaggcgctgtgggccgggctcctcctccggctcctgcgcgaccgcctcccgccgggctctgccggcgcccgccgtccccgcagcgccgctctgcgcccgccgccccgagcgcccgcgcggggctggcgggagcctcggcgggcgcgcgggcgcgcggggccatggtcgtggccccctgacgggccgcggccgcctccatgaagcggaaaagcgagcggcggtcgagctgggccgccgcgcccccctgctcgcggcgctgctcgtcgacctcgccgggtgtgaagaagatccgcagctccacgcagcaagacccgcgccgccgggacccccaggacgacgtgtacctggacatcaccgatcgcctttgttttgccattctctacagcagaccaaagagtgcatcaaatgtacattatttcagcatagataatgaacttgaatatgagaacttctacgcagattttggaccactcaatctggcaatggtttacagatattgttgcaagatcaataagaaattaaagtccattacaatgttaaggaagaaaattgttcattttactggctctgatcagagaaaacaagcaaatgctgccttccttgttggatgctacatggttatatatttggggagaaccccagaagaagcatatagaatattaatctttggagagacatcctatattcctttcagagatgctgcctatggaagttgcaatttctacattacacttcttgactgttttcatgcagtaaagaaggcaatgcagtatggcttccttaatttcaactcatttaaccttgatgaatatgaacactatgaaaaagcagaaaatggagatttaaattggataataccagaccgatttattgccttctgtggacctcattcaagagccagacttgaaagtggttaccaccaacattctcctgagacttatattcaatattttaagaatcacaatgttactaccattattcgtctgaataaaaggatgtatgatgccaaacgctttacggatgctggcttcgatcaccatgatcttttctttgcggatggcagcacccctactgatgccattgtcaaagaattcctagatatctgtgaaaatgctgagggtgccattgcagtacattgcaaagctggccttggtcgcacgggcactctgatagcctgctacatcatgaagcattacaggatgacagcagccgagaccattgcgtgggtcaggatctgcagacctggctcggtgattgggcctcagcagcagtttttggtgatgaagcaaaccaacctctggctggaaggggactattttcgtcagaagttaaaggggcaggagaatggacaacacagagcagccttctccaaacttctctctggcgttgatgacatttccataaatggggtcgagaatcaagatcagcaagaacccgaaccggtaatcaagcctgatgatgacgaaatcaatggagtgacacaaggtgatagacttcgggccttgaaaagcagaagacaatccaaaacaaacgctattcctctcacagtaattcttcaatccagtgttcagagctgtaaaacatctgaacctaacatttctggcagtgcaggcattactaaaagaaccaccagatctgcttcaaggaaaagcagtgttaaaagtctctccatttcaaggactaaaacagtcttgcgttaagtaaaaacctgtgaccagagctgaaggaagactctaggactgaaaactgcaacagaaattagcacaatttgaaaacaaaacaaaattgcaaaagccttagttgctttttccacctaagaagttgatcaatggagaaaatgtccactggagtttgaataatgaactttgagtttgggtgcaagcaaatgactcagagaagggtccagctctcaagctgaatgacaaacatgctgttgtaaatttagtctcaggtgtaaatacccaagccctctggtacccagggagctggctggtctgtggtgcatgtgtgtccctgtgatggcaatcattgtagttgctggccttcagaagaattgaggatctgatggaggttttttatgtatttattttctgttcaccttgtgaccctgtgtcaaaatttataaagatacaaaaggcattactgaaatggtactttctgtaatttgatactatttggcttaatcatcttcacttgactatttgtaatactgttgtaatgttaactctgttaagtacccaagctgcttgtcttccaccaaagagtgctttattaacaagaatctgtgaaaatcacatttaaacactgttgcatgttgtaagaccaggtggtaccttagtaacctaaaacttgcaagagaatattaatggtagctttagaagactcaggaggagaaactgacttcagagttggaagatgttgcaagtcgttcctttttctgtccttcagggactgaagaactgggaggctgcccattgtttggttgccagtcatacaaattaaaatcatatttccttccatgaatggaagaaacacactattggtttttccccttggaaacagcaatcccaaataatgtcggcttacaaaaaaaaaaagttaccacttttttagagtccttccctgtaacattggattttttttttcccttatgagatccacctaaggccattgacgtggcctgcgatctcagtgacaatgatctgcttctggatctcactgttgcctttggttagggaacacaactagtaactctgcagagtgccttctcccgcagccctactggaacacagcagagtctgtgccatgaagcagttacagaaacagaattgatgtgctgctaaaaaaaaaaaaaaaatggggcccgaaataaaagaatatatagtactcacctcagttccttccataagaagtgggtggtttaatgattgttaagccatttttgcctgtgccgggagcatggagggctgagatgtcgacaggcagtgggaaacaaatgccctcctaagccacaaggcgtgcgccagattagtaggcaactccattttaagaagctgcctttttcacaaaactggaagaaataaaagcggttggaataaacaagttaaaagtctttaatgcaaaaagtaattgaaaggcagtgcctccattttggtgtactttcttggaagaaagtataaaattgaccggcatcatgagagacggaagatgccgtgttctcagccaaacaagcaactctttccccgccaggcactgtcgggtggggtcaggccagcttttaaacactggggactggatcacagaaaaacagtggttttctgtccctggaaatgaataggcacaaagacccacttggctgtgggcagactactcttcaataagatttgggtgggaggaggaacattccttttgctattttgagctgagacaatataaatattcaaactgtgccatgcataaagcattgaattctcagggcacctcttcttccccttaccccttttaaggccatcccctccattaataataatccaggtagttgtgaaaatcgtgcttctatctgatcccttcttagtttggcttttcatcccatcagaacaagtaaacgtaggcgccacagctcttgtgagtactgtctccctcacggtgaatgagcctcctggtgtttcgtccaagaaaagaaagggtgtcactggaaccacagccctttttcattttataaactgcctcttcatgttgcctgctcaagtttccacctagaattgctatcactgtggctctttctaaaaatctttctatttaactggttcactgaaattagtcatagaaaacttgtgatttggtgaagaggcattccttgtaataaccaaatgacttgggatggtgtgcatagcaagggcagtgttacacttatgaggactgtctctagcatccaggaagtctctgggtctgagggatggaaagttcttcctgctatgaatgagagtggactcttcccctcacccccaactgaaaccacaaacaaccagaatcttctggaattctgacttagagtcgttgttatagaagaccttgttgctatggaacatgaaactgtgtgtcagatggagagatccccttaacctaagagccttaaatagccctgaaagtacactgggacggtttgcgatggaattaaaattggaagtgaatatttttaggtgctcttgaagctttctggggactcaaaattatcaaaagtcagggacagtccggaggaagagcgtctgcaaaactgggttcctagaagtatagacggacttagctttttgtagaatttggtgaggagcagcgcctcgtgagagcagaatggcctggcgtggccagtgcttcccggcagcacgcagctctgcggcctccagaattcccctgttctgagcttgatgcccctagcctgtcccctacctacttcctcccctcctctctagccctctcacaggggtgattgctacctctctgttttcttgggcctaggcaagttttagaggagttcccaagcattgttatgaggccagtgtgctcgctgggctgggcgggatggcctgggcttgtgtgtggcctgagggctctcctggggccttctcttttcccagtcacctttggagccacagaagcagtgcactcattggatgtctgttcttaacacagcttctctttctacattaaaaaaaatcattattgcattttggaaagcagtgctcatcaaaagcaacttttaaaacctattttattgttcctttaaatgttctctcccgctgaaactgccctggagaggctatctgctgctcttccatttacccacatcaggttattctccatgtcactcagtggagatgactccagatgtgtttaaagactggacaattcacctatactgtgtaggaaattacctccttaattacctggtagaattgtcagcagacatgttcatccgatgatagtactgcagttttctattaataatttgcagacttttatctaacctgcactcatgtacagattattaaaagttttaaaatgtaactgatcagtattgatcaatcattgtcttgatttttttttacagcgtatatttctaatcatattttttaaagccaagagaactggttgaatgaatgtttattttcctgaaggtatttttaagataaagcttcctaatggcgtgtaaactttgcatatgtatgtagtttgatacatattgtcacatttgaaaatcttgtgggttgtaactggttttatacaaaatatcgaatagtggaaattgtataattacaatcatgtaattaaaagtattaaccc

SEQ ID NO: 1675 - protein, 494 aa, Homo sapiens
MKRKSRSSWAAAPPCSRRCSSTSPGVKKIRSSTQQDPRRRDPQDDVYLDITDRLCFAIKRPKSNVHYFSIDNELEYENFYADFGPLNLAMVYRYCCKINKKLKSITMLRKKIVHFTGSDQRKQANAAFLVGCYMVIYLGRTPEEAYRILIFGETSYIPFRDAAYGSCNFYITLLDCFHAVKKAMQYGFLNFNSFNLDEYEHYEKAENGDLNWIIPDRFIAFCGPHSRARLESGYHQHSPETYIQYFKNHNVTTIIRLNKRMYDAKRFTDAGFDHHDLFFADGSTPTDAIVKEFLDICENAEGAIAVHCKAGLGRTGTLIACYIMKHYRMTAAETIAWVRICRPGSVIGPQQQFLVMKQTNLWLEGDYFRQKLKGQENGQHRAAFSKLLSGVDDISINGVENQDQQEPEPVIKPDDDEINGVTQGDRLRALKSRRQSKTNAIPLTVILQSSVQSCKTSEPNISGSAGITKRTTRSASRKSSVKSLSISRTKTVLR

SEQ ID NO: 1676 - DNA, 4368 bp, Homo sapiens
cacggaacagccctcctggggtccccacgagccgcgtcctgctgtgccccggcgcctacgcagcagcggccgcggccgcggtgggcacgcacggttaccccgggcagctccggccgccagctgcagccccgtcgcctcggccgcgccagccggctgcgggcacctgggggcgggctgggggcgccggccgcggcaggaggcgctgtagcgagggctgcggcgccggtcctgcggcggccgcgggaggcagcggggcaggcgctgtgggccgggctcctcctccggctcctgcgcgaccgcctcccgccgggctctgccggcgcccgccgtccccgcagcgccgctctgcgcccgccgccccgagcgcccgcgcggggctggcgggagcctcggcgggcgcgcgggcgcgcggggccatggtcgtggccccctgacgggccgcggccgcctccatgaagcggaaaagcgagcggcggtcgagctgggccgccgcgcccccctgctcgcggcgctgctcgtcgacctcgccgggtgtgaagaagatccgcagctccacgcagcaagacccgcgccgccgggacccccaggacgacgtgtacctggacatcaccgatcgcctttgttttgccattctctacagcagaccaaagagtgcatcaaatgtacattatttcagcatagataatgaacttgaatatgagaacttctacgcagattttggaccactcaatctggcaatggtttacagatattgttgcaagatcaataagaaattaaagtccattacaatgttaaggaagaaaattgttcattttactggctctgatcagagaaaacaagcaaatgctgccttccttgttggatgctacatggttatatatttggggagaaccccagaagaagcatatagaatattaatctttggagagacatcctatattcctttcagagatgctgcctatggaagttgcaatttctacattacacttcttgcaatgcagtatggcttccttaatttcaactcatttaaccttgatgaatatgaacactatgaaaaagcagaaaatggagatttaaattggataataccagaccgatttattgccttctgtggacctcattcaagagccagacttgaaagtggttaccaccaacattctcctgagacttatattcaatattttaagaatcacaatgttactaccattattcgtctgaataaaaggatgtatgatgccaaacgctttacggatgctggcttcgatcaccatgatcttttctttgcggatggcagcacccctactgatgccattgtcaaagaattcctagatatctgtgaaaatgctgagggtgccattgcagtacattgcaaagctggccttggtcgcacgggcactctgatagcctgctacatcatgaagcattacaggatgacagcagccgagaccattgcgtgggtcaggatctgcagacctggctcggtgattgggcctcagcagcagtttttggtgatgaagcaaaccaacctctggctggaaggggactattttcgtcagaagttaaaggggcaggagaatggacaacacagagcagccttctccaaacttctctctggcgttgatgacatttccataaatggggtcgagaatcaagatcagcaagaacccgaaccgtacagtgatgatgacgaaatcaatggagtgacacaaggtgatagacttcgggccttgaaaagcagaagacaatccaaaacaaacgctgtagtctctccatttcaaggactaaaacagtcttgcgttaagtaaaaacctgtgaccagagctgaaggaagactctaggactgaaaactgcaacagaaattagcacaatttgaaaacaaaacaaaattgcaaaagccttagttgctttttccacctaagaagttgatcaatggagaaaatgtccactggagtttgaataatgaactttgagtttgggtgcaagcaaatgactcagagaagggtccagctctcaagctgaatgacaaacatgctgttgtaaatttagtctcaggtgtaaatacccaagccctctggtacccagggagctggctggtctgtggtgcatgtgtgtccctgtgatggcaatcattgtagttgctggccttcagaagaattgaggatctgatggaggttttttatgtatttattttctgttcaccttgtgaccctgtgtcaaaatttataaagatacaaaaggcattactgaaatggtactttctgtaatttgatactatttggcttaatcatcttcacttgactatttgtaatactgttgtaatgttaactctgttaagtacccaagctgcttgtcttccaccaaagagtgctttattaacaagaatctgtgaaaatcacatttaaacactgttgcatgttgtaagaccaggtggtaccttagtaacctaaaacttgcaagagaatattaatggtagctttagaagactcaggaggagaaactgacttcagagttggaagatgttgcaagtcgttcctttttctgtccttcagggactgaagaactgggaggctgcccattgtttggttgccagtcatacaaattaaaatcatatttccttccatgaatggaagaaacacactattggtttttccccttggaaacagcaatcccaaataatgtcggcttacaaaaaaaaaaagttaccacttttttagagtccttccctgtaacattggattttttttttcccttatgagatccacctaaggccattgacgtggcctgcgatctcagtgacaatgatctgcttctggatctcactgttgcctttggttagggaacacaactagtaactctgcagagtgccttctcccgcagccctactggaacacagcagagtctgtgccatgaagcagttacagaaacagaattgatgtgctgctaaaaaaaaaaaaaaaatggggcccgaaataaaagaatatatagtactcacctcagttccttccataagaagtgggtggtttaatgattgttaagccatttttgcctgtgccgggagcatggagggctgagatgtcgacaggcagtgggaaacaaatgccctcctaagccacaaggcgtgcgccagattagtaggcaactccattttaagaagctgcctttttcacaaaactggaagaaataaaagcggttggaataaacaagttaaaagtctttaatgcaaaaagtaattgaaaggcagtgcctccattttggtgtactttcttggaagaaagtataaaattgaccggcatcatgagagacggaagatgccgtgttctcagccaaacaagcaactctttccccgccaggcactgtcgggtggggtcaggccagcttttaaacactggggactggatcacagaaaaacagtggttttctgtccctggaaatgaataggcacaaagacccacttggctgtgggcagactactcttcaataagatttgggtgggaggaggaacattccttttgctattttgagctgagacaatataaatattcaaactgtgccatgcataaagcattgaattctcagggcacctcttcttccccttaccccttttaaggccatcccctccattaataataatccaggtagttgtgaaaatcgtgcttctatctgatcccttcttagtttggcttttcatcccatcagaacaagtaaacgtaggcgccacagctcttgtgagtactgtctccctcacggtgaatgagcctcctggtgtttcgtccaagaaaagaaagggtgtcactggaaccacagccctttttcattttataaactgcctcttcatgttgcctgctcaagtttccacctagaattgctatcactgtggctctttctaaaaatctttctatttaactggttcactgaaattagtcatagaaaacttgtgatttggtgaagaggcattccttgtaataaccaaatgacttgggatggtgtgcatagcaagggcagtgttacacttatgaggactgtctctagcatccaggaagtctctgggtctgagggatggaaagttcttcctgctatgaatgagagtggactcttcccctcacccccaactgaaaccacaaacaaccagaatcttctggaattctgacttagagtcgttgttatagaagaccttgttgctatggaacatgaaactgtgtgtcagatggagagatccccttaacctaagagccttaaatagccctgaaagtacactgggacggtttgcgatggaattaaaattggaagtgaatatttttaggtgctcttgaagctttctggggactcaaaattatcaaaagtcagggacagtccggaggaagagcgtct

SEQ ID NO: 1677 - protein, 444 aa, Homo sapiens
MKRKSRSSWAAAPPCSRRCSSTSPGVKKIRSSTQQDPRRRDPQDDVYLDITDRLCFAIKRPKSNVHYFSIDNELEYENFYADFGPLNLAMVYRYCCKINKKLKSITMLRKKIVHFTGSDQRKQANAAFLVGCYMVIYLGRTPEEAYRILIFGETSYIPFRDAAYGSCNFYITLLAMQYGFLNFNSFNLDEYEHYEKAENGDLNWIIPDRFIAFCGPHSRARLESGYHQHSPETYIQYFKNHNVTTIIRLNKRMYDAKRFTDAGFDHHDLFFADGSTPTDAIVKEFLDICENAEGAIAVHCKAGLGRTGTLIACYIMKHYRMTAAETIAWVRICRPGSVIGPQQQFLVMKQTNLWLEGDYFRQKLKGQENGQHRAAFSKLLSGVDDISINGVENQDQQEPEPYSDDDEINGVTQGDRLRALKSRRQSKTNAVVSPFQGLKQSCVK

SEQ ID NO: 1678 - DNA, 4299 bp, Homo sapiens
cacggaacagccctcctggggtccccacgagccgcgtcctgctgtgccccggcgcctacgcagcagcggccgcggccgcggtgggcacgcacggttaccccgggcagctccggccgccagctgcagccccgtcgcctcggccgcgccagccggctgcgggcacctgggggcgggctgggggcgccggccgcggcaggaggcgctgtagcgagggctgcggcgccggtcctgcggcggccgcgggaggcagcggggcaggcgctgtgggccgggctcctcctccggctcctgcgcgaccgcctcccgccgggctctgccggcgcccgccgtccccgcagcgccgctctgcgcccgccgccccgagcgcccgcgcggggctggcgggagcctcggcgggcgcgcgggcgcgcggggccatggtcgtggccccctgacgggccgcggccgcctccatgaagcggaaaagcgagcggcggtcgagctgggccgccgcgcccccctgctcgcggcgctgctcgtcgacctcgccgggtgtgaagaagatccgcagctccacgcagcaagacccgcgccgccgggacccccaggacgacgtgtacctggacatcaccgatcgcctttgttttgccattctctacagcagaccaaagagtgcatcaaatgtacattatttcagcatagataatgaacttgaatatgagaacttctacgcagattttggaccactcaatctggcaatggtttacagatattgttgcaagatcaataagaaattaaagtccattacaatgttaaggaagaaaattgttcattttactggctctgatcagagaaaacaagcaaatgctgccttccttgttggatgctacatggttatatatttggggagaaccccagaagaagcatatagaatattaatctttggagagacatcctatattcctttcagagatgctgcctatggaagttgcaatttctacattacacttcttgactgttttcatgcagtaaagaaggcaatgcagtatggcttccttaatttcaactcatttaaccttgatgaatatgaacactatgaaaaagcagaaaatggagatttaaattggataataccagaccgatttattgccttctgtggacctcattcaagagccagacttgaaagtggttaccaccaacattctcctgagacttatattcaatattttaagaatcacaatgttactaccattattcgtctgaataaaaggatgtatgatgccaaacgctttacggatgctggcttcgatcaccatgatcttttctttgcggatggcagcacccctactgatgccattgtcaaagaattcctagatatctgtgaaaatgctgagggtgccattgcagtacattgcaaagctggccttggtcgcacgggcactctgatagcctgctacatcatgaagcattacaggatgacagcagccgagaccattgcgtgggtcaggatctgcagacctggctcggtgattgggcctcagcagcagtttttggtgatgaagcaaaccaacctctggctggaaggggactattttcgtcagaagttaaaggggcaggagaatggacaacacagagcagccttctccaaacttctctctggcgttgatgacatttccataaatggggtcgagaatcaagatcagcaagaacccgaaccgtacagtgatgatgacgaaatcaatggagtgacacaaggtgatagacttcgggccttgaaaagcagaagacaatccaaaacaaacgctattcctctcacatgtcccctagctgtgctgacctctgcactgtgtagtgttgtcatctggtggattgtttgtgactacattcttcccatcctgctattctgactaaaacagtcttgcgttaagtaaaaacctgtgaccagagctgaaggaagactctaggactgaaaactgcaacagaaattagcacaatttgaaaacagtgtaaatacccaagccctctggtacccagggagctggctggtctgtggtgcatgtgtgtccctgtgatggcaatcattgtagttgctggccttcagaagaattgaggatctgatggaggttttttatgtatttattttctgttcaccttgtgaccctgtgtcaaaatttataaagatacaaaaggcattactgaaatggtactttctgtaatttgatactatttggcttaatcatcttcacttgactatttgtaatactgttgtaatgttaactctgttaagtacccaagctgcttgtcttccaccaaagagtgctttattaacaagaatctgtgaaaatcacatttaaacactgttgcatgttgtaagaccaggtggtaccttagtaacctaaaacttgcaagagaatattaatggtagctttagaagactcaggaggagaaactgacttcagagttggaagatgttgcaagtcgttcctttttctgtccttcagggactgaagaactgggaggctgcccattgtttggttgccagtcatacaaattaaaatcatatttccttccatgaatggaagaaacacactattggtttttccccttggaaacagcaatcccaaataatgtcggcttacaaaaaaaaaaagttaccacttttttagagtccttccctgtaacattggattttttttttcccttatgagatccacctaaggccattgacgtggcctgcgatctcagtgacaatgatctgcttctggatctcactgttgcctttggttagggaacacaactagtaactctgcagagtgccttctcccgcagccctactggaacacagcagagtctgtgccatgaagcagttacagaaacagaattgatgtgctgctaaaaaaaaaaaaaaaatggggcccgaaataaaagaatatatagtactcacctcagttccttccataagaagtgggtggtttaatgattgttaagccatttttgcctgtgccgggagcatggagggctgagatgtcgacaggcagtgggaaacaaatgccctcctaagccacaaggcgtgcgccagattagtaggcaactccattttaagaagctgcctttttcacaaaactggaagaaataaaagcggttggaataaacaagttaaaagtctttaatgcaaaaagtaattgaaaggcagtgcctccattttggtgtactttcttggaagaaagtataaaattgaccggcatcatgagagacggaagatgccgtgttctcagccaaacaagcaactctttccccgccaggcactgtcgggtggggtcaggccagcttttaaacactggggactggatcacagaaaaacagtggttttctgtccctggaaatgaataggcacaaagacccacttggctgtgggcagactactcttcaataagatttgggtgggaggaggaacattccttttgctattttgagctgagacaatataaatattcaaactgtgccatgcataaagcattgaattctcagggcacctcttcttccccttaccccttttaaggccatcccctccattaataataatccaggtagttgtgaaaatcgtgcttctatctgatcccttcttagtttggcttttcatcccatcagaacaagtaaacgtaggcgccacagctcttgtgagtactgtctccctcacggtgaatgagcctcctggtgtttcgtccaagaaaagaaagggtgtcactggaaccacagccctttttcattttataaactgcctcttcatgttgcctgctcaagtttccacctagaattgctatcactgtggctctttctaaaaatctttctatttaactggttcactgaaattagtcatagaaaacttgtgatttggtgaagaggcattccttgtaataaccaaatgacttgggatggtgtgcatagcaagggcagtgttacacttatgaggactgtctctagcatccaggaagtctctgggtctgagggatggaaagttcttcctgctatgaatgagagtggactcttcccctcacccccaactgaaaccacaaacaaccagaatcttctggaattctgacttagagtcgttgttatagaagaccttgttgctatggaacatgaaactgtgtgtcagatggagagatccccttaacctaagagccttaaatagccctgaaagtacactgggacggtttgcgatggaattaaaattggaagtgaatatttttaggtgctcttgaagctttctggggactcaaaattatcaaaagtcagggacagtccggaggaagagcgtct

SEQ ID NO: 1679 - protein, 471 aa, Homo sapiens
MKRKSRSSWAAAPPCSRRCSSTSPGVKKIRSSTQQDPRRRDPQDDVYLDITDRLCFAIKRPKSNVHYFSIDNELEYENFYADFGPLNLAMVYRYCCKINKKLKSITMLRKKIVHFTGSDQRKQANAAFLVGCYMVIYLGRTPEEAYRILIFGETSYIPFRDAAYGSCNFYITLLDCFHAVKKAMQYGFLNFNSFNLDEYEHYEKAENGDLNWIIPDRFIAFCGPHSRARLESGYHQHSPETYIQYFKNHNVTTIIRLNKRMYDAKRFTDAGFDHHDLFFADGSTPTDAIVKEFLDICENAEGAIAVHCKAGLGRTGTLIACYIMKHYRMTAAETIAWVRICRPGSVIGPQQQFLVMKQTNLWLEGDYFRQKLKGQENGQHRAAFSKLLSGVDDISINGVENQDQQEPEPYSDDDEINGVTQGDRLRALKSRRQSKTNAIPLTCPLAVLTSALCSVVIWWIVCDYILPILLF

SEQ ID NO: 1680 - DNA, 52564 bp, Mus musculus
  misc_feature (1)...(52564): n = A,T,C or G
ttttttttaatgaggcagtttctttgtgtagcctcagttgtgctggaactagctctgtaggccaggctggcctcaaactcactgcactttgcctgtccgtgtctcccaagtactcagacaaaagtcatgcaccatcattgcctggctaaacaatgatttaaaaacagacaaaaagttactgtaaaaaaaaaaaaaaaaaaaaaaaaaaaaaggatagcggatagagactccgctccctcagccctgacttcattgcatttacaaagaaacaccccttctttagttagctgtgcttccttcccaggaagacctgcataaagcctgtccgagtcatctgctcatgtgactggtcctcagcccctcagtacacgtggaaccaaaacactgccaacaaccttgtgagcctgatagcagttgcctccctcacctgtcttatccggggctttgtccatcagatgcctgtattatagcctcacgtggtgggtacggggagctgagcacaggacctgccgggccaggcccagactcttgacccctaagaactgagagataggaagtgtgcgttgtgagtgactgagcttgagtttgttttatgcagcagcagatacctaacacagttgagacatctaacagctttggactgctcagaaccaaagcagctgcattttccttggtttgaagggtggtgcaatgtcgtttcactagtcgggagaacccggaacacaattcctgggttaaaagaaacggaggtctggggatgcggctcatttggcagcagctcctcaccagagcagctgagcagtcacactctctctccctgctcgagccctctccctttcacttgagccagagatttcttgccttgcttgcatgagccttgggttcaacgctcagcaatacataatgtgaggaaggtggaacaattctggaatcagagcactgggccaataggagttcacgagtgaattaatgaactaaggaacaaaataaagagaaattcagtgaaataagccagactttatgtgccaacctaaaatcccagctatttaggaggctgaggcaggtggatcccaagttgaaggccagcctcaacaactttgtgactctgtccaaatgcaaaataaaaagatggctggagatacagctcagtagaactatatataggactataataacagatctcatatctgttagatttactctctaagacagacagacaaaaccaaaaatcatctctgtttacactgtggcctcacagtacatgtgcctcaagctttgtcttgaggtaaattttcaccttgaggtatttaagatctggacgtagcccatctctgggatatcccagagatcccagggattgttgcccattaggaggagacttttgctttcaaaaagcttccagtgagggatgcgctgtgaagcagagtttctactgacttagcagaaaaagtcagtgtcctagaatgtggacacttggacagtactctgatgtgagtcatgtggtcacatgacaggagcacacaggctagggtgtcacaattacaggaatgggtgtcatcagataagagtgggtgaaaacctcctacaaattatcacagggagggcaagtatcctttggctctgatttgttcatagctagaatcctgcttccacttccttcaaagaacacaaagcattattctgaacaaacagtctaggcattgtgctcctgacaacagagtgtcaaaaacacccttccaaagttgggcaggtatggcatcaaaagcttgtaatcccaggacatgggtggaagaggcaggagaaccaggagtccaagatcatcccttttgagacaatcctaggctacatgaaatctctcctcttctatctctctctctctctcgctctctctcaaaagataagaaaagcaagaaaaaaaagaaaagaagaacaagcaagcaaaaaagatcatggtcaataatagctgttgacatttcatagaggagaaaactaggacccaaaatccgacagcatttgtttaatatcacctagctatacagaagagggacatagaataaacagtcaagtgaagtaaacaatcagtttgtaccaggtgtagtggcacacctgtaatcccaggtgtagtggcacacctgtaatcccaggtgtagtggttcacacctgtaattccagtgttttcaatgtgaatagtaaaggaaagaatgtcaggagttcaaagttatcaaggtcattcttgacttcgaagtgagtctgaggccagtttgcgctcaaagagatttgttttaaaacacagatgggtgtgatggcataggcctttaattccaggagacagacagatctctgtgagttgaaataattctggtccatatagagacttgtaggtcatccaggcttatacagtgagaccttgtttcaaaaagcaaactaaaacacaaaatagctataatgaccaagaacatgcctatagtaacagcatttgaccaaggcaggaggatcagaaattcaaggacaacttggatcttacagcaagaccttgtctcaaacataagacaaatatctatctatctatcatttatctatctacctatctatctatctatctatctatctatctataaaataactgtatagttaaagcacgcaaggggctggcgtgtagctatatggtagagtatctgagcacttgcctattttatacaaggcccagattctaccttagcactgtgcagagctttattctctactgtggacaacacattctccaaccttgagaagaaaacttgccccctaaggtaggatagccttttattttattttttaattttttatttttttattattttattttattttattttattttattttttggtttttcgagacagggtctctctgtatagccctggctgtcctggaactcactttgtagaccaggctggcctcgaactcagaaatccgcctgcctctgtctcccaagtgctgggattaaaggtgtgtgccatcacgcccggcaggatagccttttagataggatgtggtggtgcacattaattccagaacccgggaggtagaggcaggtagatttatgtatgtgtatacagtgagttccaggccaggaggatcaggaattcaaggtcctcttctgttacacaggatcagcctgtaaccatattcccatcagaagagaagatattttaaagaaagacacttgaggtactaggctactaaaacattgaacctcaaagagttaatgaatggctgaagtcctggagtcagtcagaggaggaacttgcctctcaggaaggaagttcacacacttatcagactaccttggagagactggagccgagacaatcataggcaagaatgcttgaccaagactgctgagttgcgtatcttctnnnnnnnnnnnnnnnnnnnnnnnnnnnnnnnnnnnnnnnnnnnnnnnnnnnnnnnnnnnnnnnnnnnnnnnnnnnnnnnnnnnnnnnnnnnnnnnnnnnnnnnnnnnnnnnnnnnnnnnnnnnnnnnnnnnnnnnnnnnnnnnnnnnnnnnnnnnnnnnnnnnnnnnnnnnnnnnnnnnnnnnnnnnnnnnnnnnnnnnnnnnnnnnnnnnnnnnnnnnnnnnnnnnnnnnnnnnnnnnnnnnnnnnnnnnnnnnnnnnnnnnnnnnnnnnnnnnnnnnnnnnnnnnnnnnnnnnnnnnnnnnnnnnnnnnnnnnnnnnnnnnnnnnnnnnnnnnnnnnnnnnnnnnnnnnnnnnnnnnnnnnnnnnnnnnnnnnnnnnnnnnnnnnnnnnnnnnnnnnnnnnnnnnnnnnnnnnnnnnnnnnnnnnnnnnnnnnnnnnnnnnnnnnnnnnnnnnnnnnnnnnnnnnnnnnnnnnnnnnnnnnnnnnnnnnnnnnnnnnnnnnnnnnnnnnnnnnnnnnnnnnnnnnnnnnnnnnnnnnnnnnnnnnnnnnnnnnnnnnnnnnnnnnnnnnnnnnnnnnnncgagagtcacagtctcagaaaataaaatcaatataatagaggaggtacagatgacatatacacacacaaataaaatcagttccaaaaaggatgcttatatataatttatatacctttttgtttttagaacctctgggaaaaaaaggcatgtaacatgaaaagggaaggcgtctctagctgcttctagaatttcgaagttcatcactattgagtgtgagaccctcagaggctaataagtttagggctgtaggtcagcagtccagcaattgcctggcagccacaagatccctctcacctcaccatgggggtgcgtggggtggggggaggaaagattgataatcttgtggtctataaacttgattttcagtgggtttatctggactccagaaataacaagcgtactgggcttgggaaagctttggttaccacctgagcttggtatacagttgtggggttctgctcgattgaagcttggtggttatagcaggagctgagggtgtttgtgagggaactcctcctgattctggcattctgattgcctggatgggagcctcccctggaacatgatactgtttgctgttggctatttcagcttcagcacaaagtgtatgacgaaagtcaaggcaagccagttttgataaacaaaactccaactttgatcctaaagatggagaagcagcctgacagagtctttgcataaatgctgggggtgggggtggagcggggtggggggaccctgtgagttatacacagacgcccacaagagagggcttgttttctaatggagccttctgcttcaggcgtctcattccactggtacaaaaactagttgcattcctttcttgtgatgtctgccaaaattcacaagttcaggcgggtgcttcatgggaccatgaacaccccactcattcctggcagactggactcctgacctcattttgagatggctcaacgaagtctgttatttctagctctccagattggccccagtttgcaacaacagacttagagggactgtactttccttctgggacactccacacaatggtaaaacaagttgttctttgcaatgatattaaccctaaaaaatatttttttttctaagctgctgtctgcatgagccactagaaagaatgggaggttttttgttttgtttttgtttttgttttataagtcgggatattcatcctgtccatcctggaacatgatgtgcttagtgaagttgtgtaaaatgttttctggtaacaatcctcttataaagtctcttcttagctgggaggtggtggcacacacttttaatttcagcactcaggtgacagaggcaggtaggtccctctgagttgaggtcagcctggtctacagagtgagttccaggacagccaaggctatacagagaaatcctgtttcaaaacaacaaaacaacaacaaccttttccagatgaagtatctgagcagtaattggtggtgaatttaaaatacagaagtatgactggtaaaaaacatccagcgattttttttgcagtcacaggaggaaacaaaacaccccacagagattatcacagtctgtttttcaaaactgttctagaaggtgcttccctcttcttgaggaaacctctcggtagcctcttccagttgggaggatgttttgaattgaaactgacccagaaaccagatcacaccccacagtgctgactctagcagagaaagcggggtagagtagaagttaaaagcccagaaggcaaattcagttcagggaactgttgcaatgagggaaacgggaactctgtgtagaaagagctcctttcttagacaccagtgcaaattaggatttgtggtctggactgggaggggtcagtggatggggtattctgagtaaattgacttagcagtatttgtaaattagcaggccaaggcccaaggacagagttgactttgggactataacaatttagagagtctcaatagttagagcaaggacatagtattttctggaggcacttctgtaggagtggctgatgattatcacccagactcagttttttagcccttggataatacttattccagccatctgggaccacatccaggtatttgggaaccttgatgtgatccaagtgtctaaaacaccgttgaaggtggaaatcgtgttcaggagtcttgcttggcagcttggggacctggaggaagggtggaccttgcggaggcaagcagtttaactgaagcaaagataaacagctgtagggggtttccgcacaaacaggctatggtaagccagctgagacatcctgacctgatcctgagttcctagaactggataattttccatgggattctccattaaggagatcaaaatctagtgaagcctgaaatggtctcaggggaggaacttttgcactatcttgccctgtcacaagacgttagaggtaatcttcaagatatgaccactcagacacagtttgtagccaatcgaaagtcttttttccaccggtgcatgtcgcctctgtgtctgtgagttcttatgtgggacgattctgttaacgtggagagtcttatttccttggtgtccttcatctcctctggcttcgctttctgcttctccttccacagggttcctgatccctgaggggagggatttcatggagacatcgtatttagtgctcagtgtgttacaaggtctctcaccctctgcatattagtggcaggtctctgtctctctccctgtatctgtggctgaagaaagcgtctctgatgatggctgagtaaggcatagcagaatgtcattaggagtcattttattgctatgttcatttgtaagggttcatgattcaccaaaaaatgataccctgtactcaaatagtatgtaaacgcagagtcttattctgcagaagtccagcattctgtgggtctccccattactagaatagacaaataagtgagctcgcagacttgattcaaaacacattagggaattcccagggtaggttacctctatgttaatctgttgggtccatctctatggacaggacattccactaccaggatgtggagactggaaacttgctggggaggtctggtaaaagtaactgaggaagtagctgaggaagtctggaagctgctgctgacctattgtccttgcctcaggccaggtggcagggcagcctctgatagcaggacgtttctgattagctgccagaagcttcggttgttgttatttatttatttatttattttcctagtaactgacttgcctgggcttaggcctagtctcctacactgctaatttgaagcctgtcatggaatcagcacagccttctcgcttttagtagaagagtagtaattgattttactctgggtttctgggctatttagtttcaagttcttgatcaccaaagctgctttgggtctgggttttacctggtggagtgggtcgtacataagtcaaattggatatttacatttctcctttggtagtatgcagagtaccttcctgagtcaaagagcctgtacggggtgaaggctctgtgtaggcaccagcttgacttcatgttcaatgagttgtgttggtattgtcttcaacaatggggccttgctgtcagcttgtggagagcaacctctagtctcggccacagcataggttgtttaggggttcccatgagaccccctttggccaataatcatactggaaatttctttgtgccaacaagtgggtctctgcatctatataggtttcttgtgcctttccttgggctcgtttccttctgtttgcttattttgacctattacaacatattagattttgtttcatctcattatattttattattatcattttgaagcctgtttgtttttccatgagagacagaaatggggtggagccagatgggagaggaagtgtggaggaactaggagaagcagggggagggaaaaccataatcaggatatatttattatatgggggccgggggggggacattcagtaagagaagaaaaaaataaagttacaagatctacaagacccttctgataagttatgtctctgctggtgaaatgagccaactcaatccagattagaatatattaaaggcaggtttattgggaagctactccaaggtgagctcactgggcccaaggacagaggtcaaagaagtaaccatgtggagagagaaggagggggtggggaagagaaagagcccagaaggagagagagaagagaaaaggaaaaggaggagagagaaggagagggtggggagtaagaggaggtgtggagagagaagggggagaggaaggaagggagggagggagggagagagagagagagagagagaatgcaaaatgtctggattatatagggaagagcctcagcggatgggtagcccagcccctggactggaaagttcagggttgggggcagagtatgccaggtagggactgagggacgctgggagaacctggaggtttgatttgtaaaatatgcacctcaatccccagtcccaaggtctgaaacaaatacgccttcctcagggctgtaaaagctgcaagtgactgcttgacagagaaaattctcctgctgtctgagctgtctgcaagttggatgcagggtgcagtgttaaagttgtgtgttctgtgatgcagctgcctttgagtcactcgtgccctgaaagtaatcccaacaaactcattagactagacttgaatgtagtcatttctttggtctgttgtctgtgcctgatttggggtaaggagattttcatgttttcccaggaaaagcctcctatcagatttctaatataaagctatataatcaatgagatttgttttaattctcaaggagcatatctgagctcagttgtgaagtttagtttactttatatatggcttcgtcagtgagtggctctgaagaggataatgcaacaactccagatgtcttctcaattcttcctgcgggcagggacaaccctgggctaggacccgaaggaatatgcagtcattctcaccagccagacctgataggaatatcttattgctggcttcctctgagagcctggaagttttggagccgagaggtggctgctgagaagctactggggttgccaatacactctgtgcagctctactgtggagagctgccagaagccccgtttccctggctttctcctttgctgactttacagtgcattcgttcacggggacagtaactgactgtgagaataactgttcaagagtctttcccatgaatcactgaacttgatggtgatcctggggattcggacacagtcttttctctaaagcttgttaaaaaatgtcctgctccttcttttaaaagataatgttggtttatttactcacttattcagttatgtgtctcccacacttgtatgattgtccatggaggccagaagagaacatcagatggcctgcaggtgacgttacaggtagttatgagctgctggatgtaggtgtaggtgcttaggtccgaactccgttcctttggaagagcagcaattgctcttaaccaccgagctatgtttttgggaaaatgtatagagttctatgatttttcacagatcattaaaaaaaatctagaaacagggctggggagatgactcagtggttaggagcactgactgctcttccggaggacctggtttcaattcccagctcccagatattagctcacaactgactgtaactccagttccaggggatctgacattcttgcataaatatgggcaaaaaagtggtgcacataaaacaaataacaaatatatatacatgtatatatgtatatatatttgttatttgtttatatatatatagttgttatttgtttttgttttgtttgtttgtttgtttgtattttagtgtttttttttttttgggaaaaagttttactgtttagcccaggcaagcttcaaattctcagcaatccaccagtgctagaatcataggtgtgttctcagttaaaaatatttctatattaccaggcatggtggtgcagcttttaatcctagcacttggcagaggcagagaggcagagaggcagagaggcagagaggcagagaggcagagaggcagagaggcagagaggcagagaggcagagaggcagagaggcagagaggcagagaggcagagaggcagagaggcagagaggcagagaggcagagaggcagagaggcagagaggcagagaggcagagaggcagagaggcagagaggcagagaggcagagaggcagaggcagaggcagaggcagatctttgtgagtttgagaccagcctggtttacatatgtttcaccccagctagaggtatgcagagagactatatctcaaaagagaaaacacacaaacttctgtaacattttaatgtaatgatatcacaagtctttcctgatgactgagagttaagatatttgaaggcagctgataaaactagaattgccctcagagctagtatgtttttcctaaagttattgcaaatgaggacattaagaacaataaatgtggggctggtgagagcactgattgctcttccaaaggtcctgagttcaaatcccagcaaccacatggtggctcacaaccatccataacgggatctgatgccctcttctggtgtgtctgaagacaactacagtgtactttcataaataaataaatcttaaaaaaaaaaaaaacaataaatgtaagccgggcgtagtggcacacacctttaaacccagcatttgggaggcagcggcaggtggatttcagagttcaaggccaacctggtctacagagttccaggacagcctgggctatacagagaaaccctatctcgaaacaaacaaacaaacaaacaaaaaagaaaaaaaagaaaagaacaataaatgtgcagtctgcatgacagctgattgggaaaaggcaacctgactccctgggctcccaccctgggatccacacagtggaaggatgctgttctctgacctgcccaccccctgaaacaaacaaacaaacaaacaaacatgtaaacaatactatcaacagcaaagcacagctgggtgtgagagtctgagtcccatacctatcacttaagaggttcagacagaacacaggctataaggaaagcctgcccccagctagatttgattggcaataaagaattgtcatacagccaatggctgggcaaagggaatcgaagtgggacccatagagttgcaagggctaagacaggaggaggaagggacagatcaccataaccctggggagacagatggaacatatttagagctgcagaggggagatcatctgaagggaacgcagctcccaaagggctgcccagaagcatcttgggcaaagaccagtgggcttcacagaaggtaacagagcagcaaagttaaaagtagatttagaaggtgttgagccaagagtattggagggaagggcgtgctagccgccactgagctagtaaggcacattaaaaataagcttgtgtgtgtgtgtgtgtgtgtgtgtgtgtgtgtgtctttcacttggggatccaaaaatagctcctgggtgcaggtgtaggacttgctagtagcaaaaagtcattgctacagagttgccttgttcatggtgtttctgcacagcaatagaggaagtggctgtgtctccctccatcttacctcttaagtgctgaggttactgtttgtagcaccgcaccggctgtttctcatcctgtaatggtagacactgttactgagatgaagaagctactgtggcctgtcttctttcccccactgaccacttgcattttttcacttgaataattcttgattattcaatcaagaatttgctgttttgttgcttattttttttttttgagtttgtcagcgtattctatcacagcaacaggaaagtaactaatacaatcatgatctacttcctcttattactcatatgcattacttatgccacaattaatttccaaattaagtgacaagttcgtgcctcacaggccacaaccgtcctgcctacaactaaaacctcttcccaggtttcagactccttaatatttgtctgagtaaattttgtcttagtaaaagttctgttgctaagaagatgtcacgaccacaataactcttataaaagaaggcatttaattgaggcttgcattatatttgaagggttagttcattaccattgtgatggaaatcttggtggcagacatggtgttggagaggtagctgagagttgtacatagcaccaggcagtagggagagagtgggatatggggcctggtttgagcatttgaaaccccaaaatccacccccggtgacatacttcctccaataaggtgacacttcttccaataaggccacacctcctaatccctggcaagtagcactgttccctaatgaccaaacattcaaatctatgcgtctatgggggctgttttcatccaaaccatcataatcttcattcctctccttggtgccttaatatatgcataccttatgtagatttatttactttgtttgttttacaggatctcttgtaaacaaggctggacttgagctcctgatcctcctgtctgtctccacctctcattatgtagattatgtcaattatatggcaaaggatgagagatggaaccaagataaacacgcactgctatacacatacaaacattcataaccaaataacgaaaaccgctcttattagttgtagtctttgtttccatgtctgcccaggcgcgcatacctatttgtgcatacaaatcatctttctctacgcagtctatatttcctttgtctgcagctcagccctcttccaattacagttctttgttagataagggactcacacgttctcccctgaagacgctcatgatcagcactgcctacactgggttgctctagtgtcccagtgacgctagaacccatctgcggatatgctaagaagcaccttaagggatcccctgtggtccagaggcacagcacttggaggacagcagttccttggaagtcagaatcagttgttttaaccaataacaattccagctttgcttgctgattcaaaggtacatgaaagccagaaggcccgtaagagtcttcctctctttgttttgctttgttcatttatttgttgtggccctggagtatcctagttagggcttctactgccgcaacaaaacattgtaatctatcactgaaggaagtcaaacagggttggaacctggaagcaggagctgatgcagaggccatggaggggtactacttagttactagcttgctcctcatggcttgcttagcccgctttcttatagaaaccagggatgacaccacccactatgggttggaccctctcccatcaatcactaattaagaaagtgccctacaggcttgcctatagaaaggatctgacataaaggcatttcttagttgaggttcctcctctctgacaactctagcttgtgtcaagttgacataaaactagccagcacacagggtttgaacccagggtctttcttgtgctaagcaagaactctaccattgaactatatccccagcatttctattttttagacagggactcctggagttgcccaggctggccttgaacctgcaatcttcctgcatcagacttgcaagtaactgcaaataagtaaggttatttacaggccaggcaattgggagcagttttaacttccagtttagtgatattgattttgtgacctgtaggctagcagaatataaggttgcatggacaaaaggaacaacaattttgccaaaaggatgaatggtgccacttctatttctactccctccctggaaactgtgttcctggctccgagagaatcagcaactctatgctgaatgcattcactctgcctcttggattttagggatggtttagagaggtgatggatggtttgagacaggagagctgaggtcaagtgtcctctcgcggagagctttataaagaattgttaacacaacagaaagcagagaaatctttcagcctcaccagaaaaagtggggttccccgcattaaagatttctgaacaagagaggaggtcctgtatcatgtagttagtaagtagcctacattagggtgacttttcatttcctgggcggtaagggcgttagggaacaagaccacaaggttacagctggtgttgcctgctagttcctcgcagtaggcacgagcagctgcagannnnnnnnnnnnnnnnnnnnttttccttctttaaagaatgggtgggattgatattatttggagatatactttgctgtggattagtgttgcttctctggttggtctgtaagcttaaggcccaaactaggagagacaaggtggttattgcccaggcacttgcagctctagaacatggtgcttcccctgatatatctatgcttaagcaataggtcgctggccattcagctcttgcaccccacgaggctagtctcattgcacgggatagagtgagtgtgcttcagcagcccgagagagttgcacggctaagcactgcagtagaagggctctgcggcatatatgagcctattctagggagacatgtcatctttcaagaaggttgagtgtccaagtgtccttctccccaggaaaaacgacacgggagcaggtcagggttgctctgggtaaaagcctgtgagcctaagagctaatcctgtacatggctcctttacctgcacactggggatttgacctctatctccactctcattaatatgggtggcctattgctcttattaaaagaaaagggggagatgttggaagccgccctcacatttgccattataagatggcgctgacagctgtgttctaagtagtaaacataatctgcacacgtgcaggggcagttttcccgccatgtgttctacctttctcgtgatgacaactgggctgatgggctgcagccaatcagggagtaatacgtcctaggcggaggataattctccttaaaagggacgggggttttgccactctctctctcttgttcttgctttttctctctcttgctttcttgttcttgttctctctcttgctttcttgttctttctcttgctttcttgttcttgttcttgttcttgctctcttgctctcttgctctcttgctctcttgctctcttgctctcttgctctcttgctctcttgctctcttgctctcttgctctcttgctctcttgctctctggctcctgaagatgtaagcaataaagcttttgccgcagaagattccggtttgttgcgtctttcctggccggtcgcgagaacgcgtgtaagagacagggactcctggagttgcccaggctggccttgaacctgcaatcttcctgcatcagacttgcaagtaactgcaaataagtaaggttatttacaggccaggcaatcgggagcagttttaacttccagtttagtgatattgattttgtgacctgtaggctagcagaatataaggttgcatggacaaaaggaacaacaattttgccaaaaggatgaatggtgccacttctatttctactccctccctggaaactgtgttcctggctccgagagaatcagcaactctatgctgaatgcattcactctgcctcttggattttagggatggtttagagaagtgatggatggtttgagacaggagagctgaggtcaagtgtcctctcgcggagagctttataaagaattgttaacacaacagaaagcagagaaatctttcagcctcaccagaaaaagtggggttccccgcattaaagatttctgaacaagagaggaggtcctgtatcatgtagttagtaagtagcctacattagggtgacttttcattcctgggcggtaagggcgttagggaacaagaccacaaggttacagctggtgttgcctgctagttcctcgcagtaggcacgagcagctgcagaggatgtggcctgatctgggagatagcagcacctgctcttactcagccttccttgttgccggtgtcaataaaccagctctgtaaaacccattctgttattttatgaagctgcttcaggatagaacatggtaagaacactgaatttcaagagcatgggcccatgattccttcacctgatgttacatgatcagaaatctgcgtggagtgccatgatagtgtgtactgtgggtgttggtgagagcagaggtgcagctcctttccatcctcacacatccttttccttacggacctctaggattcgtggcactccatgatgcctatgtagagatcagaggacaactttcaggaattgattctctccttccatcatgtgggttccagggatcaagcccaggaacttcagtggcaagtacaattacccactgagctatttgaaagaccctaaaaggtagtggttctcaaccttccgaatgctatagtccttgaatataattcctcatgttatggtgattccccccaccataaaattatttcatcactacttcataactgtaattttgctggttatgaatcatgatgtaaatatctgtgttttctaatggagttaggcgactcctgtgaaagggttatctgaacccccaaaggggccaaggcctgctgttttgtacagatattcaatgcaggctttattagaaggagtcacagagaaaggatgagataagtgtgagtgtagacgaccacagggagtgttacatttaggtttctttcaacatagtataagatgttgatggctctcaagcaatgcctctgaaagttaaaaagttactcttccctgcatgggatttacctaggccctctgcacagttgtatagtgtggtcttcatgtgggactcctaacagtgggaagcacaggctgcctctgactgttgcctgcttttgggaccctttccccttacccagctgctccatctagcctcaacagaagatgcatctattcttactgcaacttgatagaccagggatggctgatagccataggaggtctctccctttgtgaggagaaagggagaaagaatgtagtggggtagagaaaggtgaggggagtggagggagggactgggaggagaagaaactgcggttgggatgtaaattaattaactaactaaaaacactaaacaaaaaatatgctctcatagccaggcgtggtggcgcacgcctttaatcccagcactcgggaagcagaggcaggtggatttctgagttcgaggccagcctggtcttcagagtgagttccaggacagccagggctacacagagaaaccctgtcttgaaaaaaccaagaaaaaaaatgctcttccttttgaatcattgttcagagatgtaatttatagaaagtttagagttaaagaagtttcttttgcaacaaggccaaaagctgaaaagtagaagctcaccgtgttgaagctctgtctaaccagtgccttcctttccactgcggctaggcaaggtcagaggtagctgggtggtgggtgctgagaatccacagagaagattgtccaatccaccctattgctaaaatcctctcaagggacaatgagatttgtgggggtgttgttcagatctaggaattggagaggagtgttagaaactcaagattgtatatcacttcggcctacgtaagcacaatttattgattgtctttgacaagatatttttaggaaaatattatattgcctctataaacaatttcagctttatcagcagggcctgaagcttcctgactgtcagcagaaaaagggcagtcctgagatgaagggatttttttttcttttacatttcccttctgtgtccataattttttctggctttctgtcctgcctcatataaagcattcttaaagactgtctgaatgcaatgaaaacacgtttgtgttcagagactgtgtctattccagactgtttcctttatgataagagggtccattgtgatcaactaggtaactaacagactttctggggagtcactccataccggaggctcaatttcgctctcaggtgcttggtagactctcagtgtgacaatgggaagaacaagcctgcctcggtgagtggaaactcatgtagctgaggccttgtctaaccaaccccttctgccatggcttggcaaagaagctgaccagaatctatagactcctgattatcaaatatttctatgggctggtgagatggctcagtggaaaaaggtgtttatcactaagcctgggtttaatctccaggacctacatggtacaagaaaactgactcctgaaagttgtcctctgacttttacacatatactgtggcacatgcatgtgtgcatgggcacacttgctcacacacacacacacacacacacacacacacaaacatacacaattataaatcaatgtaatagaaaagtccttccatgttgaagtctttctttggttagaactcaaatgaaacacaatttcttacttttttccttttttcctttttccctttttccttggagaagtctgtccacaaagcttgtcgctggttttgctgccatggtgtttcaaagtcctcatcagccacagcccacgagtctttccacagtcatatgtctgcccatttctccatgtaagcaaatgacccactagtcacactgctccaagccctgcttgctgtagggaggggagattttcctccattacagcatttcaggggtgtcagctttagttgcaaacttgacacagcctagagtcatctgagagatgagcctcactggactttcctagatcagattgtcctgtgaggatgatgggagggggatcatctcaattgttaattgatgcagaagggtctaggccactgtgggtggcaccattccctgggcaggtagtcctaggctgaatgagaaagctggctgagcagaaacctgcaagtgagacagcaagcagtttttctccatgacttctgcttcaagttcctaccttgacttttttcagggatggactacttaacaatgtaagataaaataaactttttcttcccctaagctgctttttgccagtattttatccccgcaagagaaataagggatgtccctgaaagaggctatggtgctgcagctgctcaatcccagaaccttttgtaaatcagcctctaagtttctctttcttattaatttcattttggggaaacccctgacttcactagtatgtagttgtgggtggaggaaagccatagagcagggatggaaaccttaagtctttgggatactcccttatgtcacatacttgtgtcttcagggccacattaagactctgagaatggagtgctgcaaactagcaaaattttatgggctaatgagtccagttcatactagaaaaccctagttgtaagatactcaagtagctgattgtattagccagttctctagacaacagaaccaatggggtggctttatgttacagtggggactttattagatagtataagggctaggtagtccatatttgtctgtctgaatttctagagagcctgggaagcccatgatgagttcatgagcccggatacctcagcagtcccagtctggccttctcccttcagttactccttcctggaaaggaatgacctcatagagctgccagatgcacataccttaattggttccagacctaatcaagttgataatcaagattaaccgtcataagtatgattaagcactcagcatctataggccccacagcaaccaggagctaggtctctgaaggagagggtgatctacagaggacttactgataattcctaaggacctccattgcagttcactcataggggttgccaagagctccaaacagcatccctatctaacactactactccacacacatccatgatattgatgctctattcctaatagtcaggaaaggagccagcctagaatgtccatcaattgatgaacggataataaaactgtggtacatatacaagtaggatttaattcatctgtaaaaaaaatgaaattgtgaaatattcaggaaagttggaaaacatattgaatgaggtaatctaggcctagatagacaaatgctgcatattctccctcatgtgcagagcctagcttcaaaatttcagaccagtattttggtggcttgaatgaaaatggctccaactggctcaacttggtccccagttggtggaggtgtttgggaaggattaggaggtgtggccttgttggagtcggagtggccttgttggaggtgtggtgtccttgtgtgtgggtttggaggctttaaaagcccaagccagtcccagttgactctctctgtctcatgcttgtggatcagggtgtaagcacttagctacgattccagcaccagcctgtctgcctgctgccattctccctgacatcatgatgatcatagactctaactctctgaaaccatgagcccccattcattcttcttcttcttcttcttcttcttcttcttcttcttcttcttcttcttcttcttcttcttcttcttcttcttctttaaataagttgctttggtgtcttttcatagcaatagaaaagaaactaagacaagcgtgtttaacttgatgcctgtagaggccaggaacctagaaaggggcattagagggagaagagggagaaggctttaaaggagagggagaagctgaacacatcggggtgtcctggaggtggaaaggtttaagtgaagataggaacagggggtggggaagaggaggaagaaaagggttaactaaaactaagggtgtgtgaaaaatcattggtcaccaaacattttgcaagtctattaaaaggcataattaaaaaaaatgtttgaattgcattgggttctgttgtttatctttttaggttaactctcagatcatttggtacaaacattttcacacacagagagaaaaggaccttttcatttgtagattgtttatctgttttactttgaagaacacctgctcatctggcaatgtcataggaacctgtaagtcatgcttggggtgggcgcttagactcaactgtcttcaatggtgatcattcacatctcctttaatcctgtcacttgggaggcagaggcaggtggatttctgtgaatttgaggctagccttgtctatatactgtgttctaggccagtcagggctgcatactgagacctacctaggtcatggcagagcagagcattgtctgtcctgagtttgattcctcagaactaaaaaggatactaatgacagttatcattttaaataagtattcagacaccctataatcctagcacttgggaagtggaggcaggaagatctggagtttgagatcagccaaagcaaagtgagccagctgtctcaaaaaacaaccaaacaagctctcttgttctcttctctttctcctcttgttcttgctccctttaccctcttcctcgtatctcccctcccccccccacatgttctaatggcctgtctgtactcctctacaactctaactctctctctctctctctctctctctctctctctctctgcctttctctgtctctactctctcaactcccttccccattacctaaataagctctattctataccataccatccacgtggctggtacctctagggtaagggatgcctcagagcatgggtcagcagaggtaccgccttcccccacaccatactgagcctctactaaacatagcgctggcttctctttcttatataaaatataacaattttgacttataaaaaaaccaaaaaacaaaaacacacacacacaccccaatcagaagcatagggccacaaacatacatcagaataaatgttttaggaaatatgtaaatgtcgatttaaagtaaacatgaacacagtcctgaaaattttaacagcagtccaaaccaaagggaagccacctgagtaagttacttcaacaaggtctgtagattagctctctgaaggacacgtcaactgagcagttctcctgtgcagttaatgttgactctcaaggcaagagtaatgttcttttcactattttttttttctggttgtagacaaattgatactaaagattatttggaagaacaagcccaaggctcttaaacactaaagaggggttgggaaagggttaaactttaacacacatcaaactatactatttagtttgtacaatgaaaagataaaatagggctggtgagaaggctcagcaggaagggtgcttgtcaccatggctgaggagcacagaaaggtggatggcaaataagagtgagattcttcctttttttggctcacagttagttattactaaggctaaccaggaagtagtaagttaattaatgttgactgatggattagcatctttcctgcctcgtgattactggaatccatagggtggatactatggagacgagggaatctgagaaacaaatcattccattctgaaactaaattaccttagttctggaaactgttacagtttaaccaaaatggagttgctgtgcgaaatgaacaggccctgcccaacacagggcaggggcagcctggcatcccaccaagttatgaccagcagacagccgcctgcatctgctctgcttcattgactcgaggattcattgactcaccaagttcacatatgtgaaaaagcacatctgttgtgcttgctttacttggcaatacctcagctccatgtcctgggttccatttccttgggttgcagtttgaaaaagtatccccaggccagcctggcctttcttccctcccttccctacctccctccttccctttcctttcccctccctttcttccttccttacccctcccttcttccttcctttcctccctccttccttttttaactcaaaggtctcatgaagcccaggctaaccttgaatttgctaagaagctgggaatgaccctggacttctggacccttctgcttctatcctctatcttctatcttctgagaattacaggcatgagccactactccctggtttatgagctgaaacctggggctttgtgcatctaggcaagcacaataccaactaaatcatatccccagtccttccgggtatctcttaagactgtgaatatggaactcacaactgttacttgttctctctctctctctctttttcttttaaaaccttattagtattgttgttctgggctatccatagagaagattgcttggatttaagccaatagaaagtctttactagctaaccagcaattacactggatcccaggctttctcagggtgagctcttaaactggttgacatacttaagttagcaagaacagttagctagaatgataactatagaagccaaaaagtcacacacaatcaagatacaatttgcgaaacacatgaaactcaagaaaaatgaagaccaaagtgtggacacttcgccccttcttagaattgggagcaaacacccatggaaggagttacagagacaaagtttggagctgagatgaaaggatggaccatccagagactgccccacccgggggtccatcccataatcagccaccaaacgcagacactattgcatatgccagcaagattttgctgacatgaccctgatatagtctcttgtgaggctatgccagtgcctggcaaatacagaagtggatgctcacagtcagctattggatggaacacaggacccccaatagaagagctagagaaagcacccaaggagctgaaggggtctgcaaccctatagctggaacaacaatatgaactaaccagtacccccagagcgcgtgtctctagctgcatatgtatcagaagatggcctaattggccatcattgggaagagaggccccttggtcttgcaaactttatatgccccagtagaggggaacaccagggccaagaagtgggagtgggtggttaggggagcagggatgggggagggtataggggactttcaggaaagcatttgaaatgtaaatgaagaaaatatctaataaaaaattgaaaaaaaaaaggaagccaaaaagcaaggttaagcaaggttagtacatttagtgacttttctagaactatgggctttgatggattagatctttgttttcattttggctggtggtactgtctatgtgttgagttttatgacctgaatggtaggtactttcattatgaagtcagttgtgctaagatctgggaccctgttataattattatttcatgtgtatataatgcatttcgtgtgtgcttgtgcatgtgcgtgtgtgcatgcgtgcgtgtgtatgtgtgtgtgtatgtatgtggtcacagggtatctattctttgcttcttccctttctttcttccttctctcctcctatcttccttccctccctcctttcttcacttaaaatatacatcggaattacaaattgaactttcccatgattctaaagtataaaacacaaaaaaagccttcagacatatatcacagtgttagtggcacacaatatactgacatttcaaaaacataaatcgatttttatgtttttttgttttactctcattttcttttcaagattaaaatacatccaaggcaaaatgtgaacaggatgaaaggaaggttgtcacatagttacacctgactgaaaggtcctgtaactgtggaagacaagattcacaaggcaagagatttagagaccatgggatttaaacacctcaatgccagggtctcctagcaattgtattattttattttatagacagggtctcactgtatagcccctcctggcctagaacttgctatgtagccaggctagcctcaaacttaaagagacttgccggtctctgactctgagttctgcaccatcacatgcagcataaaacatacaaggtctaaatgtgaatacatggatatgctagacaacaacagtatggaaaatagttcatttaacaccaagcctaggaagactgtattttagtttcaaattatataagcttcaagaaaatggaggctacaaaggaagaagagagatgatgcatagtggtaaaaactgtcaattcattaaaaagtcactactgtaaatgaatattcaaattgtctgtgaaagcttcaaagtacatcaagcaaaatccatgagaacaaaaggggaaagttgggcaatgactgtgttggttattttaacactattttctcagtaacttgtgaagtaagaaaaaaaaaagctcattttataagatgttatactgcaaatgtttgtttagatgaaatcttactttgtagctctacgtgaactcatttagaccaaattggcttcaaacttgaagagctcctgtttcagcctcccaggtactgggattataggagcgattaccctctgtggcaggatatatgttagcatttcttctaggctctgcctaacagttacctagcaagagccaggtaggagcctggtttgctataaaaggactggttgcacacatgcgctcttctctctctctctctnnnnnnnnnnnnnnnnnnnnacacaggacccctctctcccccccccctccctctcgctctcctccccttcccctccctctctcccttccttctggtctcttccctctttctccacgtgttctagctggcctctttccttctttctttctcctcgctctgcccttctcctctttctttctctgtctcatctccctcccctacaacccacttcccatgtcccaaataaacttcattttatactagacctgttgtatggctgataccccaggggtggggtggaggtggggagatgcctctgcatgggcccactaaggcatcccctcttaccgctttatgttgactcattacaaaacttattaatatacattctttaaaaaaaaaaaagattagctgggcgtggtggcgcacgcctttaatcccagcactcgggaggcagaggcaggcggatttctgagtttgaggccagcctggtctacaaagtgagttccaggacagccagggctagctatacagagaaaacctgtctcgaaaaaacaaaacaaaacaaaaaaaaagatttattttatttttagttatatctataggcagctatgagcaggtgcctaaggaatacagaaaagttggacttaacaggcagttgtgagtggccccacttgtgtgccggggtcttctacaagaaagtaggtattcttaactgctgagtcatctctccagtccaggatatgcattctttcaagtacatgtaagaggtttcctaggttagtttatgtacttgtccatagaagtaactatttaaaaacaaaaccatacaataatagtattatctttattgttttgaatgtagagaaaatttggggaaaggatatttatgtgcttgatagtgataattgttttgtaagtgcatatttctctccagactgatagaaagcattggagtcacggggcacaaatcatgaggaaaagaccacccaagtcagaaataaaccaaaagcaactttattcaccttgggggtgggggtggggtgggggtggggtgggggtggggtgggatgcttctaactggttagggtcctggtcaggctccaggctgacagcaactaccttgaaaaggcagagcagtctcaggggataacaaggaaggaatttgtaaattgagggttagttagagcccagggtgtggtggacagccggatgtaggcacaggctcaaggctattctaaggcagccgacttatctcaacctttacagagctcactccggccaggtgatttttttactgcagctgaaaagaatgcagaccttgaggacatgatgcagccagatgctggccacagaccaaatgcctggattgactctgggctcttaagtagtaaatatgcacagctttcacatgtcaatcaaagatgaataaagtggtttcaaaactgccttttaggggcccaggaaatagtcctgctggtaaaatcttgctgtgtctaatttctatgttggtcagtactggtgagccatggatatgttctcttaattaattaattaatttcccctctttgcaaaaataaaccctacttagtgttttatagacttactaggaaagataagaagcaatcaaatacacaaaaaccaaataagctgaaacaaggccacaggcttgcaatacttctttttgattaaatgtaaaattttgtgtaaaaaaaaaaaatcattgtctttaatgataaaaagctaaatgtagtgaccatatggtaaactgtggaccaagcgtcatgaatttgctcaacacaaacaggatatgcttcatgcatgtgtagtcacggaagaccgtgagtcattcctgttaagcaaggctgctaaataaacctcattgttcctttagcacatgtattgcttagtcttttccaggttctaactacatacccaagaagaagcaacttaaagagaagagccttttgttctggcttatagtttgagggatatagcccattatggtggggaaggcatagcggctggaccacatgacagtttttactctgtttccacagctgggagcagaaggtgaacaggaactggaggctgggctataaagcctctaggcttacccccagtgacccacttcctggagcaagactctacttcctaaaggttccgagactttccagcacagtgccagtctctgggaccacgtgtccaaatttgagcctttggaggacaattcgtatttaaaccacaacaataggtgatagattttcttgcttattttaggttgaacttattcatatttgtgtgtgtttccttaggagataggtcttgctgtgtagccttcgttggcttcgaacttaaccatttatgtagaccaatctagccttgaacttgcttcagttctctcgtttcagcctctccagtgttggggtggcaggtgtgaggcgccacacccagcttggactaggtttgtatcatttgtctgtgatgtgtcaaatgctttgtaagtgagctcttcctcctgtgtgccgcaattgcccttgtggcctaaccttggcatctgcccccaggcatgacttttaataccctgtagtaggagtcggcaactgagatgaattaacttttgtataatcagatgtatccagatatatcagtcttcgtgtgtgtatgtgtgtgtgtatgcatgtgcatgtgtgcatgggttcatgtgtatatgtgtgtgtatgtatatttgtgtgtgtatgtactgtgtatgtggtatgtgtgagtgtatatgtgtatgttgtgtgtatgtgtatgctgtgtgtgtgtgtgtgcatgtggatgtgtgcatgggttcatgtgtatatgtgtgtgtatgtatatttgtgtgtgtatgtactgtgtatgtggtatgtgtaagtgtatatgtgtatgtggtatatgtgagtgtatatgtgtatgtggtgtgtatgtgtgtgctctgtgtgtatgtgtgtgtgtgtgtgtgtgtgtgtaagggaggggtgtgcatatggaagccacagagcaataccaggtgttattcctcaggagccaactactttgtttttgagaagagtctctcactgggactggggttcatggattaggcgaggctggccacttagcaagcaccagggatcttcttgattgcagtgggtaatcaagctccatgctaccacacctggctttttacatgggttctaagaattaaactcaggtcctcatgcctgcatgcaaacactttaatgactgaggtgttccccaagccacaactgttttaaagttgccttctccttggtttagcacctattttgttggtgaagagtcttttctttcagagctcataaagttgattctgacatgtcccctattggttttgtgtaggcacaggcttgacaataatccatcagtttcattaatggccttttaatctttgggataaaggataacagctgttttgaaagttttgcttgctgagtatctagatatacttgacaacattgtttgagcaagtggttgggggatttggtccaggtctttatttgtgtgggaagttgtatatgtttgtgctgagtttggatcatactttgtgagttttatttatttatttttgttgctaataactatacatttaggcaatatattatagtgcttctgtattcttatttttctttagctgtttgctcagacctaaactgtataatatgtggctgtacagatgtgtaattcctaacacctatgctttcttcattgatttgttttttattttaatttttttgtattgaagtggggaatccaatttgtaacctaagctaatctgaactcacttacatagcttgggctgacgtcagactctcatttctaaaatttattagtgtgcatgtgtgtgcatgtgcacatgtgcaggtacatgtgaattgtgggtgtgggggtcatgtgtgctgtggtgtccatgaggaggtcagagaactctctttctttccacctttctggggattctggggattgaactcaggtcacagggcttgcatgacaagtatctgtgcctgcttggccatctcactagccccaaatgcttctctctctcccttcccacctctctctttcaagaccgatatatttctatgtagccctggctgtcctggaattctctctgcagaccaagctggccttgaactcagagatctgcctgcctctgactcccaagtgctgttccccgcccccccaaccccaattcttattgttagttgttagcatagcttctttgcaattagccaggtgactttctaacttggcagttggcttgtgatttgggagagggttgaatatgcaaggcttctaccctctgctcatcggcctgtgcagtttagggaatctgtccaaagttcagcctgttcccatatcagccttgtcttttctgtgtcatatgctnnnnnnnnnnnnnnnnnnnntgttttgcaaattgtaccttgggtattctaagtttctgggctaatatccacttactaatgaatgtacattgtgggaagccgccctcacattcgccgttgcaagatggcgctgacatcctgtgttctaagtggtaaacaaataatctgcgcatgtgccaagggtagttttccactacatgtgctctgccttccccgtgacgacaactcggccgatgggctgcagccaatcagggagtggcacgtcctaggcggaggataattctccttaaaggggacggggtttcgccattctcccctttgcactcttgctctggctcttacttcttgctcctaaagatgtaagcaatagagctcttgctctggcccttgctcctgaagatgtaagcaataaagctcttgctcttgctctcttgcgctcttgcgctctggctcctaaagatgtaagcaatagagctcttgctctcttgctctcttgctcctaaagatgtaagcaataaagcttttgccacagaagattccggtttgctgcgttcttcctggccggtcgcgagaacgcgtgtaagagtacatcatgtgtgttcttttgtgattgggttacctcactccagatccatcctccagatccatccatttgccaaagaatttcataaattcattctttttaatagctgagtagtactccattgtgtaaatgtaccacattttctgtatccattcttctgttgagggacatctgggttctttccagcttctggtattataaataaggctgctatgaacatagtggagcatgtgtctttattacaagttggaacatcttttatgtatatgcccaggagaggtattgctggatcctctggtagtattatgtccaattttctgaggaaccaccagactgatttccagagtggttgtaccacataacacaccacatacaagcaccacatatgtacattcacagacaccacacactcacatacacacagtacatacaccacacacacacatacacactacacatattacatataccacacacacagacccacatactacatacagcacatacactgcatatacatataaatacattatacaataccacacacatcacaatacatgcccacctcttacatacactacacatacataccatacacacacacatagacataccacacatacatgtacacaccccaaatatacaccacacacatacactcagacaccacacattcatacatatatacacacatacacacacactacatacaacatacatacaaacacacatgtgtgatatttctagcttgccctttactctaccccttccctggcttggtggcctgtcgcactcacctcgtctggcaaggaaaacgcaacacggtcggattcttctcaacagctttattgcaggaacgcctcgatgctacaggaaccccaggcacccagggaggactccttatatacaccccagcacagggaaaagctttgtgtcctcctgggattggtcagtctgccggcaccttaatttgcatgcacccgcttgggaggggttggtgccagattcgggttagcgcctgcgcagtggtgttgtttacggtgctggtgtactggaaaccggcgccatcttttaggcaccggctgcctacagtggccagtcctaatgaagctttcatacttccaacaaagcatggtctaaacaagagttatcacttctttaaaaattatatttatataaacacaattgaatttaaaatatttattttattctatgcgtataattgctttacctgaacatatgtatatgtaaccatgtgtacatctggtgtccacagaggtcagaagaggcatcatattccctggaactggaattacttcatgagtcacaacgtgggtgctggaaactgaacttgggctctcttcttaaccactgagccaccactcctgtcctgttttaaaagtttcaagttaatttataatgaaaatattcaggagtttctgatattttgtgtgtcaggtagtactacatccttagtggttgggatgacttggggtgacaagggaatgaagaaagaacccatgtgcagacacacagacacactgttgaaagctggggttgggtgggttacactacttggatggagtgcacctactacgggataacccagaacctcaaggggtttatcatgtacagcagtattagccagtcttggtaggaggtctttgtaggccagcagtctcaggctgtaaacattcaggagagggaggctgtagttgctagtttttgcacacatttaaactcagaccagagaaaggctttgcatccatctgggtctgactccgaaggggaagtctttgccattcccacaggtgtgagacactgagtccttggcatggccgtgtctgtgtcaataatatacattaactcgggactttatccactccttacatgttcatccactcagggattcttttgcccctatatgcctgcatctgggtcagagttagctttcatgaacatgcactcattagggatgaggcaattgtgcactatttattttattttattaagacactgtgtagggggctggagagatggctcagcggttaagagcacactgactgctcttcctaaaggtcctgagttcaaatcccagcaaccacatggtggctcacaaccatctgtaatgagatctgacattctcttcaggtgcatctgaagacagctatagtgtacttacatataataataaataaatctaaaaaaaaaaaagacactgtgtagcttgatactctctttgaaggaccagcctggccttgagcccacagaaatctgtttgcagaaatctgagtgctgggatttaaggcaccaccacccctggaggataatttcacttactttcaaagaaacaataaatactgattacaaattgcttctttaattttttttattacattttaacttatgtattcatcgatgttggctcacaccatagcacatgtgtggaggtcagagatcagcttgaaggattcaatctctccttctatcatgtgggcctggggatggaactcaggttgacaggtttggtggcagacacctttacctgctgagccgtctcactggatccttctctctctctcttctctgtctctctctctctctgtctctctctctctgtctgtctctctcattctctgtctctctctctgtctgtctctcttattctctgtctctctctgtttctctctgtctctcattctgtctctctctgtttctctctctctgtttctctctctgtttttctgtttctctctctgtgtttttctctctctgtgtttctctctctctctctctctcatataaagaaacaaagcagaatgaaggaacaggcaggtgataaacgctgttctgagttctgtctgcttaggccttccatgcttcagacactaggtgtcagcagaacaccttgcctttctctgatctctactgccagtcaggacagtactttttttttcttcttttaattaaatgtattttttgtttgtttttttgacagtttcatacaatgagtactgtatttacatcatttcatctccaatttcttctgtctcctctgactccctcttaaattcatgacctcttctttaattattatggttacacatatacacatatgtacatgagcgcgcgcacacgcacacacacacaaactcatttagttttgcttatatgtataggagtgaccaattggactggatagcctattaggggacttctccctggagaaaactgatttcccttctttcttagaattctctcagctactgagacattgaactctgtagtacaggctggttttgaaatcatgatctttctgcctttcagcatcccaaagtgctgaaatcacaggctgcactacctggaagggggctgatgatgctttctgtttttaagtataagaagtttttctttccctttaaaaactcttttagaactttatacatattcagctcacgatactgacatccgttgacagtgaaagggaagttattgcctcaggaccccaaattcttaacacgaagatttatttaccccagagggcaggggataagagacaaagacaggagatagaggacgaaggagaagagggggagaggaggcaagtatatttgtcccaggatgacaaaggactgcttttggatagagaaaagacagacatggcccataggcaaatggtggtttataaaggtaaagggaaaaacccatattagaatgaggtgtttaattttaattggacatgttaattaggtgagccaaagggggcttttaatttccgactttaatactttgatagctggacactggtagcagcctcaggaggaagaattggccaagaaggaaccagaccttggtggcttgctttaggaatgtaatttaacttttttttttttttcttttagcaaggcagagggaattgggaagaagggcaaggcaagtgggccaatgtccctttggaaagaggaaaggcttcggcaaaggtctggaactcccaatattgggtgagacaaacttttcaaagagaatagtcttgtctaatcccaggacttgggagtcaaaggcaggtagacatctgtgagtttgaggccagcctggtttacagagtgagtttcaggtcagctagagtaatactgtgtggcccctgtctcaaacaataaacaaacaaacaaacaaaaccccagtgtattagttttggatatcaatgctacaatttccttaattcagaggtaattagccaatgaaagctacactcagcatacaatcaaggataagctcaaattcctgggcttctgccccctcacgctccctctaccccctagtccacacttggatttcctttttctgatttaaacctaggcgtagtgtgtgccacaggtatggcaaaaactttcacttatctcatgccctgagaagagggtcccacagccattccatagagcctggctggcttcatattctatttaaaagtttcgtttcttttgggtttgagaaagtctcacacagtagctcaggctggcctggaacctgaggcaatcctcctgcaactcctagtctctctagtattgggattgtagggagtgagcaaccacccctgaaacactttttaacaaacgcacacaaaagtggtaatttcttggcatccttgccttcccacgttagtgtaggttcttctcccctcttcttctgtcttgatttctccacagctttaccatgttggcaggtaaccttgtccatactggcttcgtacttgagattctcttcgtcttggcctgctggatactagagttatagtcagaacaactgtatcaggtttatcatctacgtccctgatagtaatcatcctaaagggtgtaagatatcttattgtggtttgatttcatttttcctaattagtaggggtgctggttgtcatctcatatacttgtggacacctctctctattttcagataaggtctcttattaagcaggatgcatcgcactgtgtagattaataagaccctgtcaagtactgggacggcagatgcgatttagcgcaaccaacataggtagtacagggagtcgaaccaaaggcttttgttcactctaggcaagcacctcaccaaaggagctttatcgtcagtgctagtaagctttttaaaaaaggtacttggattcatgatgcccttcggggaccaaaggcccaagtgattctccatgtgatggtttgtatatgcttgggctaggaagtggcactattagcaggtgtggtcttgttagagtaggtgtatcactgtggaagtgggttttaatactcttgctgtctggaagcgagtcttctccgagcagcctgcagatgaatatgttcctcctgcaccatacctgcctggatgcttcatgctccctcctttgataacaatggatgaatttttgaaaatgtaagccagtcccaattaaatgctgtccttataagagttactttggtcatggtgtctgttcacagcagtaaaatcctaactaagacactccacgactcagctctgtgcttgtctgcaacaatgatttgcgtcagttacaaagaggcctaaatgtagagagtggctgagtgagtgcctgccacctgatactctagctggtttctggaagtcttccaccagatccacctccctaccagaggctccgcctctgggcgcctgaacacaccctttacttgcgtagccctgcccctctcagccccacgcaccagcgtttcttgtcacgtggtgctatggccacgtcctggagcgttagattacgatagagtgactgccgaaggctgcggaaaggtgctgcctagaggggatgcagattcctgactgagctcagcactggtctttccggtcacgtgctttacggagcagctgctagacgcgttattgctaggcaacgcttgcaggagcctatgctggatccctgtagagtaggatctgggcgccgcgggccgacatggaccagtattgcatcctcggtcgcatcggggagggcgcccacggcatcgtcttcaaagccaagcacgtagaggtgagaccatgccgcacgtgcagtcggagggatgcccactgcgctccctctgcagtctttccgtgtagagatctgctagcgcgcgcgggcgcgcctcagaggtctctttaggatacttggcggggtcccatctgtggcgatccggcttccagcggccggactgcgggagcgcgtcccctggcggacggttcagatcttcccgacttaggggcgggtctctgtggggtgtctcgctcctggggtgttctctccctgcccctaccttgccaaaggtctctggcagtgtcggcactctttcctgcacagactggcgagatcgttgccctcaagaaggtggccttgcggcggctggaggatggtattcctaaccaggccctcagagaaatcaaggctctgcaggagatcgaggacagtcaatatgtgagtggggctgggctcaggtggtcatgcagggctcgggtgaacaagacgggtggcaggttccaagacagcagcttcttgaccactttcattcatttccatccctctctactcaccaatatacactttaaaggagtcctttctaatccccactctgccccctcctgcttactcctcatttatgctcccagatccactctcacctgagtacttcaccctcccattctctctcatttacacacccattgctcatatgtttatgcatccccccccccttaactattgtgtgggtttctttttgttttctcctttccttcctatacctgctctcccaccttccttacgctagacaggtgctgggccattaaattatgcccctaaccatgctgacttctcagcagtttgcacccgttgagcccctactttgttctgaaggatatcttaaagactttcatgtgtggtcaccctgcgttcactctgcttttctttctttctctctctctctctctctctctctttctttctttctttctttctttctttctcttcagggtctttgttaagcacaggggaatgcttggcttttatcatcagctcatggggtctgcagctgagtgacactgccagaatgcccctggggcctcctaaaacttctgggcctgtgcacagcactagtgacactgaggaattggtctcagtctgattcctgagagcttatgtgtgatggaatcagtttgtgtgctcctgtattgtgaagtgtagtggtgtgtgcctcaaaatttactgcagatgagatatgtgttcatacttcatctttataacatgagatatgtgtttatatatgtgtactgtgtgtaacatgtgtactgtctgaatgtaggtgtgtatttttatttgttccaatgctggtttactgccaaaataaaaccttcactaaggtggttcctttttgttgttgttgaaaataaaagggctttccaggcagcttatgtgtgggacaggtggttcaagacccataaggatgctgatgattgacagccgtcctgacgttgccattttacctggttaattaatttatatttaactttatgcgtaggaacattttgcatgtgtttatgtgtgtgtactgtgtgtgtgccttgtgcccattgaggccagaagagggcatcatattccctggaactggagacggatggttgtgagccactatgtggatgctgggaaccaaatctgggtcctctccaggagcgtcaagtactcttaaccattgaactgtctctctagtcccaagttttcattaaaaaaaaaaaaaaaaaacaaaaccaaacaaaaaccaaaaaactaggggatggggaaatggcttggtgggaactgttaatccaggtgaatgtcaggtgggtgcgatactccacctgtgagtccagtacttataaggtactggacaggagacccctggagcaagctggttagtcagattagtgtattgggaaggctctgaattcaataggaatacattgcctcgacacataatgtagagagcaattaaagagaagactcagggctgaccagatggctcagtggttaagagcaccaactgctcttccgaaggtcccgagttcaaatcccagcaaccacatggtgcctcacaaccatccataacgaaatctgatgccctcttctggagtgtctgaggacagctacaatgtacttacatataataaataaataaatctttaaaaaaaaggagagaagactcatgacttcagccatgggtacatccaaacacacagatgcatgcaaaaacatgtaagtagatttgtccccagtctttctatcttcttcactagctacctcttcttaggcatcccttcaggaactagcatccatataggttgcaggagcacgggacagaatagacatgttcatcccctaaaggatgtactactattcagctggactttgtggttcacacctgtaatcccagcacttagggagtggaggcagaaggatgcagagtattaggtcatcttcttctacatggtgagttcaagtcctttccaaaaagacacttacttcttgtccctctagccatctctgctagtctttggcccttgtacttttttgtttctgttttccatgctcagacctcctccccagacctacccctgaccaaactccttttttttttttttttttttttttttttttttagtattttgagacagggtttctctgcatagctctggctgtcctggaactcagtctgtagaccaggctggccttgaactcagaaatccgcctgcctctgcctcccaagtgctgggattaaaggcgtgcgccaccaactgcccggtgaccaaaccccttctaaataaagtatacacacttcctttgctctctcacagtcccaccgccttctagtcctataccttccatttattccctgttttctaagctcctcaagtccttgcatcctagctcactgccctgtgcaacctgggccttaagatatcggcagctacggtgtctgatgtgccttcattgttccaacactgggggagatgcgatttctggttctgttcccaggttgctgggatttcctggtcctagaggtaatgggtgacagttggtacttgagtgtacctctctaggtgatttgccatgtggataggatgggttgagcagtggaatgcttgctgctgtccactaagtcacctgatctttaattagtgggagagtagaggccatcttaactttggatagcagagcactatgagccctgagctccctggtccctgtttcagcctggccaggtcttctgtcagggcctgggctattggtgctgctggtagcggggtgggagccaaggagggctggaggccagtctagactctggaggcttatgggatgtctgccctcaggtggtgcagctgaaggctgtgttcccacatggtgcgggctttgtgctggctttcgaatttatgctgtcggacctggcagaggtggtgcgccatgcccagaggcccctggccccagcacaagtcaagagctacctgcagatgctgctcaaaggtgttgcgttttgccatgccaacaacattgtgcatcgggttagtaccagtatgggctttgttgggccggggtgagctagtccttgaagagggtgcagtcagagggtcttgaagtaagcagccagaggttgcctatccccctgtcccgaagccctgactaggtacaggggactgatgcttcctttttgtatgcacaggacctgaagcctgctaacctgctcatcagcgcctcaggccagctcaagatagctgactttggcctggcccgggtcttctctccggatggtggtcgcctctacacacatcaggtggccaccaggtagtggggctctatccctgccggccctctcactggggaagagatacgtctgcaccttctgtccaggcatgggctgtgggcctgggatgtagcttcttatcagaccagcacaatccagctgtgatctcaaccccttcccccccccccccaggtggtaccgagctcctgaactcctgtatggcgctcggcagtatgaccagggcgttgacctatggtgagatacttggggcaggtgagggtcatgtgggctgtggggatgttctgtctggttagagaggagtctgagcagctttggatctgtgttcttcatgctgatgtttttgagttggtgtggggagggttaggaggctagtctcaggtgagaggcttctgggaatggggtaaggtagtctggggtacaagggcatgtagtatgttttgtcatctgaattgaggatgcgatagttctgagctaaagtgaagcttgggtccctaggtatgagggttcagcattttggaggactagggagatagtttgtggtgttcagaggtctgagatttgggttattttgcatttatgccccgcccccaaatcgaggaggagctgggtagcccagacatgaggctctaagagtcctggagctgcagggcgatactctgttctagatatctgtggaggaatgatacatggctgccctgggaacctctggaccttgatcctgatgtgaggtgttaaagctcgtgtgagtagcttgatcactcacgtgtgacatctcccaccgattagctctgtatccacagggctgtgggctgcatcatgggagagctgttgaatgggtcccccctgttcccgggcgaaaacgacattgaacaactgtgctgtgtgcttcgcatcctgggtaccccgagtcctcgagtctggccggttagtagcaaccattgttgctggggaggggccagacttgctctgttccccagtaggaagtggcttcgccctatgtaggtgtcttgggccccactcgctcttgaccaatgaagaccaaagtcttggtgctgcaggagggacaggttttatctggtctcagtaagctgggcaaggagtaggccttagagagtgggaggagctgaaggagagagccattgtgggtggtgatggactctgggctgaatgaagaacagaatgaacacctgatcaggtgggagagctggatcaggtgtggtgggagagcctgataaggggtggtgggcggggctgctctcattgcctctttttctcctctgggctcaggagatcacagagctgcctgactacaacaagatctccttcaaggagcaggcaccagtgcccctggaggaggtgctgcctgatgcctctccccaggccttggacctgctgggccagttcctcctctaccctccacgacagcgtattgcagcctcccaggtagggttaaaggttgaccccttgaccctgccaagtcagtgacgcttagaacctgcgtagggtggaacccttggagatggggttttgatggaatgttctccaggaggcttcgggagagaagtcagtgacccctgccctttgtccagcccctcccccttgtcagtgggtcttgcctgcagttgcaggtgtgagtgttgtctctttctcaccctgactgctcttgctgtgttcctagccctcctgtgtttgctcctctcaagccctaggctttcctttgggcttgtgctcctgggacccagctcttcaaagcctgcagcatctctctagtcctcctcagcctttccacccagctttattatatggtttgtcctgggagacacgaacgcgtgtctgttcactgcagaaaggacactgataacaaatctgacctgagtcgggctttagtattaggtacttcctgggacttgtgtgttttcaaggagcctcctgcccagagggaatgtttcaactgggaaggaatagctagctacaccacaagctctctttgttgccggggacatactgtgcattttgcccctttctctggtttatgtctcccaccccttcctctgttggcaagaatttttagctcactgaaatgttcccagctgttgggacagtgctccagacataggcacgtaggcaaggtttgctgagtcagttgaatgattttggggatacataatgactggatttcttgctacccccaggcccttctgcatcagtacttcttcacagcgcctctgcctgcccatccatccgagctgccaattcctcagcgcccagggggacctgcacccaaggctcacccagggcccccccatgtccacgacttccatgtggatcgacctattgaggagtcactgttgaacccagaactgattcggcccttcatcccagaggggtgagatgctggtccaggccttcctgctcgccctaggagcacctctttctgatttgcctccatggcctccccacggctatatataccacacctggtcctgctcctgagtgtgcttgagggctgggctctgggaggcagaaccgtgagatgttcatcccagcagagaaagagactcacgtcctacagacaaagcctccagaaactgctagctgtgtccttctccagggccacccctcagtggtgccacccggccttagagatgattgtcaggctctgtcccctcttcaaggacattggtactacagcaccacctggtggaagcacagagtataagctgtcttcatactggggacacagctgggaagtcagacatgttttagttttggttccactgggtcaggatttgaggttcatataaaagccctgggtgtttctgtctaattgcaccttgtctgttgctgttagggaaaggacaatggtgggccttgattcacaggggtcaggtactcagaaggggcctcctgtgaaggccatttgggtcctcaggcttcccatgctattcacgggacttgagtgctcatttgggagcgagggtccagaagctgaggcccagggatggacagtccagttcccgaagcacacttcccacatgtcgggtgggtcagtcagtgagcctgaggctgccttgcagatgcggaagcaggcattcctggaatccactcagtaaataaattccagtgtgactcagccagcttgtgttttatttcatagggatatattaagatgagtctaaaacagtgactctctacctcccaatgctgcaaccctttagttcttcatgttgtggtgatcccctgccccaaccataaaattatttttgtcatactgcattaactgtaattttgctactgttatgaattataatgtaaatatctcacatgtgattcccaagggggtcaagacccacaggatgagaaccactggtctagatcctgcgatgtcgaggatgggggagcagagagaagatgataaaaggacttgtgtgttggccattcagatttactgcagggttatataacaactaagacaggatattgtttcagggatggattagataggatcttaactatccattattcagatacataacaaaatctggtagtggttgtggtgtatgcctgtaaccccactcaggggtctgaggcgggagggttcctaagagtagaaggccatgctaggctacagtgcaagatcctgtctcaaaaaaatgcatatatgtgtgtatatgtgtatatatgcatatgtatgtacatgtgcatgcatgtatataatatacacacataggagagacgtcatatttttaaaatgtttgttgtaggcctgacatgaattggttgttctgtgagtcctggcagcacagaggtgactaacaagcctggctcctggcctgaatgcttacaaggaagagcgcagatgctgttttcaggattatgatgccttcataatccgacctctgtttatttctctggtcacatctttgcaaattctaaggacagctgagctccattgacttcttgtagctcttacgtacacacaggttaccacttgtgtctggactctgtttggaaatagttaaaggtacaggctaataaaaaggtagcccatttggtgatttctaaaccgatgccttcagtgacctctgcaaaacccttttcttcttcttttaaaaagacttctgtgataaccaggcacacaggaaacagtgaaaggaacagaaaacatctgtgggtttccagatggtggactcactagagacggtgcagtaaccacacgtcttggtactttgtaaagtgataaggtagaatagagtaggcacagttgaaaaccatgtaatacatgtaacaaagcacaaatatacagcatatagtagaatggttttacactccctcaacccctgtctggcttgttcttttcaagatgagaagataaggtcggctttgaactccctttgtggctgagatgatcttgatatcttgtctccatctttccagtgctgggtcacaagcctgtatcaccatcctcagctcatagtaatttaaatgctaagagtaaatgttctagctggaacaaaggtggctacttgtattaaaaaggaactgaaacaggtattttccagagtggaattataaatatcaaacttctacaagtaacaggataaaaaaaatgtggtatagtttgatatcaaagcagacaaaggcaattgctggggataataaactctaatgacttggcaaaagtttctacccgtatgcatacaatatagattgccccgcttttgacacagtcttgtgtagctgagggtagccttaaactcactatataggccaggatgaccttgaactcatccttctgctacccatcatgtgctgagattgtaggtgtgagccactgattctggagtcttcagtgctgggattgtgtgtgctggacaggtactctgcaagagctatagtcccatcctcttttctaagactggtcttgatatctagaccatgtttcctggagctcatgtttctccgtctctgacatagctaggtttacaggtcgatgccactatatccaacttcaggtcttaggacagatgtgagtagtgagagagctaagaatagacaaatgcaggagaatccagagtcattctgcagggttctggaagcagttcccagtggacactgatggagggctgtgttttattgcagtgccaaaatacttggtgggtttaataaagtgggacttaatgatatttctttgtatgctgccatttgtattgagttacggtatttcacaggctacattttgtctccagaagggagccaaatttgaggaatttgcagagattgcgcccccaagtcctcacccagcactgggaagtctgtaactagtaacaaaatgtgcacggccctagtttatcaggaggcttcatccaggtaaaggatttgactgtgacctggttcctggtctctcttcattattaacctaggcactagcctaggataagattccaaagctaccttctgtcttttccccagtcctggacatgacacccctttcattttcaaattgtttccttctagaagcctgagtcccacctccatcactcatcaggtggatctggtccatcccagactcctgagagaatctcagcccatcctcagcagaaggtagtcagagggctctgctggggattaaggaagctctccagaggagtgtttctctgaatggaacttgagagaggcagcatttttctgttgggtttgaagggtatggagggactggaagagtgggtgcccttctttgacaggagcaagcctgatggcttccggggtaaatcagacttatacagaggagaataaaatcgaaaagagaaagaaagaaagaaagaaagaaaggaaagaaagaaagaaagaaaggaaagaaagaaagaaagaaagaaagaaagaaagaaagaaagaaaagcaagcaagcaagcacaaatgactttatgtgtttatgagtggcaggaactttttacagtggagcaggttgcagtattaacaagggtctgcatggggtagaaagagagggaggaggaggaggaggaggaggaggaggaggaggaaggaggagggagagagaggaagggagggaacactagctgactctaggtttttccagctgacctctgattttttcctctggtcacttagaaatagtgcctgcctgatcttctcttccttctctggagcagagaggcttcatacaaggtgacagatcgactctgacccctggcctccaccactgttgggtgacactattttggggaatataagaacacatatctagccgggtgtggtggcacacacctttaatcccagcactcaggaggcagaggcggcagatttctgagtttgaggccagcctggtctacaaagtgagttccaggacaaccagggctacacagagaaaccctgtcttgaaaaacaaaaaccaaccaaacaaacaaaagaacacatatcacagaccaaggtacaaatatcaccaatatccaacctggcaaaacagctttatttgggttacttatagaagcagaagtaactcagctgatgaaagctggaaacctagagagagcactgtacaaccttcaggcagctcagcttacctgataatgacccttagcagtacttatagttgatataagctggggacaggggatgcctagtaaatctggtgggttttagggacttcctgaagcctttgagttgtttacttcttgagtgtaataaattctttgcaggatccaatgctttatctcctcatggatcatctacaagccttccttcaagatggagtcagaaaatgtgggcagtaggtggcactgttggcttgtgtaatatgatccacagtgcatgctctagagtaccttgggagaagggaaaaagaggaaaggaaaacaggaatttcctctgaatcccaaaaggcccagaagataggcagtcactcttagtgcaccaaatcatgtgactctgacaggcacagcctgagcaggacagattccaccccaccaggctgccatttcctcagagaccatcaaaggggctatcacctccaggttaggctagagaacagtccccacgatgaggggccttgtcagaacctgatcagcccagagcagtggagctgattgctggaaggggttgaggcgagggacagtagggtaaaacgggtggggagggtgggaggcacggggagggcttgtgaaaaaagaccttggtgctgatatttatgctccttttggcatcttaaggtgaaaatatgagcaaatcgttactgtgtctcctctaggagacagggactttgacaagaacacaagagctacccgcatggttgatagatcacaattggactacccgatgctcagaaacatcttggtttccttcgaatctgcctctttcttacccatccctcccccttcccaccatttctgtttctcttcacacaggggtttgttccaggtggtcatcttattattatttaaaattaacacctttttatttttatgtacatgagcaatttgcccgcacgcatgtctgtgcagcacccctgtgtctggtgccagcagagatcctctggcaatggagttacagtgagcagccaggtgggttctctagaagaacagccagagtgcctaaccactgatccgttaatacacacccgccatgatagtctgtagaacttccctagaagtttacaactccagggttacttgtttctgctcatctttatttaggtcttggggaaactatgatgtaggccaaggtaacaaaggacagctatatgtaccttctcttgtaggatcatgacttcatagcgtgtacctttcaggatcattccttatacatacatactgcccaggatcacatcttcacatgtatttaccttccaggatcattttttatacacatatacttcccagcatcgtggtttcatatttcatatgtgtgtacatatccttctaagataacatctttgtttccttatttatcatttttgagtgagaacattttttaaaaaaagtttccatcatggcatttataataaaaaaaaaagtgaagaaatggggctggggatgaggctcacctggtacagtggctacccatcatccacaaaaccgtggaatcattcatctgcagaactacataaagtgaacctgctggtgcaaacctgtaatcctaacacttgggaggtggaggcaggaggatcaaaagtctgaactacagggggttctgtatcaaaataaacaaaacccaaatctagatgaatgtataaaagacaattttattttctgtgacctgggtggaacccttcaatttcaccgttgtctttggggacgactatagaaaagtgtggttgcctggacaggaaaatcaggaggtgagatttcttgaggggcaaaacagctttacccactcctatcaggaggtttggctttattttcttttcaaagatttatctatgtgtgcaactgttctgcctttctatatgtatgtgcaccatgtgtgatacccgnnnnnnnnnnnnnnnnnnnncccatggaaggagttacagagccaaagtttggagctgagacaaaaggatggcccatctagagactgccatatccagagatccatcccataattagcctccaaacgctgacaccattgcatacactagcaagcctttgttgcaaggaccctgatatagctgtctcttgtgagactaggccggggcctagcaaacacagaagtggatgctcacagtcaactattggatggatcacagggcccccaatggaggagctagagaaagtatccaaggagctaaagagatctgcaaccctatcggtggaacaacattatgaattaagcagtaccccagagctcttgactctagctgcatatgtatcaaaagatggcctagtcagccatcactggaaagagaggcccattggtcaggcaaactttatatgccccagtacaggtgaacgccagggccaaaaaatgggaatgggtgggtaggggagtggggtgggggagggtgtgggggacttttgggaaagcattggaaatgtaattgaggaaaatacgtaataaaaaaaaaagggctggagagatggctcagtggttaagagcactgactgctcttccagaggtcctgagttcaaatcccagcaaccacatggtggctcacaaccatccgtagtgggatccgatgccctcttctggtgtgcctgaagacagctacaatgtactcacataaataaaataaatacattaaaaaaaaaaagtgtggttgcctggacaggacatcaggaggtgagatttcttgaggggcaaaacagctttacccactcctatcaggaggtttggttttattttattttcaaagatttatctatgtgtgctactgctctgcctttctatctgtatgtgcaccatgtgtgatacctggtgcccttggaggtgagaagagggtggctggtcatctggaactagagttaccaacagtcataagccaccatgtgggagctgagaacagaaactgggtcttgtgtaagagcagtgactccccttaacccccgagcccctctctagccccttgtctttttgttttgttagtttttttttgagacagggtcttgctctgtagtccacactggcctcaaacctgtgatcctgctgcttcagcctcaccagttagcccttcaccaccactctaagcagcatcaggaggtttccatctactgggcaacgaggaggcagtacgggtgtaaacagacacgaacctgttccctggagcttgcagtctaaaaagggagatagacttttctgagattcatcaaaatttgagtgaaccagatacaaaccgaggtcagcaggcatctcagaagtgtccatccgcggggcacagcctggtgagggctgatgaatatggatggcagacttctgatattcctgagatatctcatttatgctatggtcagaggaaaaagctaaaaataattgtcatgcaaaaaagtttgaaaagcagaggctcttatcagctggaaacagtagcgctctggatgctttttacagccagcttaaatttaatggccccgtggatgatcctatttaagctgacaatgacaaaggccttatgaacttcccaggttacacagaaggcaattatcaccctcactagatgtctgtgtgtgtctgaaaagcaatttaacttgctttttatttttcctttatgtggtattggggatcaaacctagggcctttcgcacattaagcaagtactctaccactgagctacaccacaagcttggaaaaaaggattttaaagccaagcaaatgtctgtcaaaccacggtgctacaaaaattccaactcaggatttttaatttacatcaatagaaaattgttgtagtcatatatatatatatatatatatatatatagtcactttgaccctagatttatgttagtgaacatacttatccatctataaatttatttttattttttaaaggaattcttaggagtaatttgagtagtcattttaaatgccctttcacttgggacctttgaatttgccctttatcttcaactgctcattttgattcctctgtttaacctaattccttcccaatgtataccttaaaaaaatcattccgtagtttcatgattttaggagactgaggtgatctacttaaaatagaacaaaacaaagtaccacagcatgtccttggtgtaaagattctccttcagcaagcatggtggtgtgaatgttagcctagtacacgggaggcagatatgggagagttgccagcctgctctacatagttagttcttagtcagtcaaggctacacagtgagaccttattccaaagcaaacaaccccctctctgcccaaaatttagaattatagcggtcataataaaaaatgataccaatagtgacctcactgacaaatcaggaagaccgtctcttttccaacccccttctacctagaagatttgaaagatatctacaatgaaatgttaaagcactgaagaaaaagattgatgaagacaagatggaaaatacctcccatggtcatgaactgagaaaatcaattttatggtgttcatgctacttaaagtgctctacagattcaatataaaccccatcaaagtaccaatgctgttcttcacagaagtggaagacagttctaggctggcaggatggctcagtggtaagaggtgcttcacactaagccagatgggtctgatccccagagcacacatgttggagtgagagaatttcctgtaaattgttcccccctcctctaattaatgtaaagagaagcttaaaggaaaatcttgatattcatatggatacaaaacccagaagtaccaaagcatttttgagcaaaaaaggatcataacacttgatttttttgaggaaggttctctttacagagtcttggctgtccgggaacttgttatgtacactagactgggcttgaactcccagagatctcctgcttctgcctcctgagtgctgggattaaaggtgtgtgacactacaccttgccataaaaccggattttaagatgtgccacagagaaacaggcaacacaaatagtattgagaagctaagtgtggtgccttatacctgtcactcaagtacttggggggctgaagcagattccctaagaatttgaggctagattaagctacatagtaaggtctaagccagtgtgagctatacaacgaaaccctatttcagacagacaactccccaacacaatgcttcataacatgaacacagaactcctcacaccattaaagagttaaactcgaatagaccaaggactttaaaactctagatcctaaaactattagaagacaatatggggaaacagttccagcttttaagggtaaccatttccccagatcacagaaggcaacgcggggattgatagatggtgtcgcattcagttaaaagctttacatggcaaaggaagccgcagagtaaagagcgagcatataaacatagaaacatctgccagttactcaccccagtttaatatccaaaatagataatgagctcaaaggcttagcagcaaaccagcaagcagcctaatacaaattgagcaaatggtctgggtagacacttctccagaaaagaactctgaagagctgataaaacacaaacaatgctcaacatgtctgaaaatgcagatcaaaactacaaaggattgcaaaatatctcaacactgggttaagaggggattcatgaccaacctcactggagtggttgtaggctggtgacaccttcagagtcacaggaggagtgggcaaagaacagtttgttctcctctcctctcctgtggtagcctgttcttgctgtattctagtcactagggggcagccttctacagtgtggacagtgatctgag

SEQ ID NO: 1681 - DNA, 1212 bp, Mus musculus
cagaggcagagaggcagagaggcagagaggcagagaggcagagaggcagagaggcagagaggcagagaggcagagaggcagagaggcagagaggcagagaggcagagaggcagagaggcagagaggcagagaggcagagaggcagagaggcagagaggcagagaggcagagaggcagagaggcagagaggcagagaggcagagaggcagagaggcagaggcagaggcagaggcaatggaccagtattgcatcctcggtcgcatcggggagggcgcccacggcatcgtcttcaaagccaagcacgtagagactggcgagatcgttgccctcaagaaggtggccttgcggcggctggaggatggtattcctaaccaggccctcagagaaatcaaggctctgcaggagatcgaggacagtcaatatgtggtgcagctgaaggctgtgttcccacatggtgcgggctttgtgctggctttcgaatttatgctgtcggacctggcagaggtggtgcgccatgcccagaggcccctggccccagcacaagtcaagagctacctgcagatgctgctcaaaggtgttgcgttttgccatgccaacaacattgtgcatcgggacctgaagcctgctaacctgctcatcagcgcctcaggccagctcaagatagctgactttggcctggcccgggtcttctctccggatggtggtcgcctctacacacatcaggtggccaccagggctgtgggctgcatcatgggagagctgttgaatgggtcccccctgttcccgggcgaaaacgacattgaacaactgtgctgtgtgcttcgcatcctgggtaccccgagtcctcgagtctggccggagatcacagagctgcctgactacaacaagatctccttcaaggagcaggcaccagtgcccctggaggaggtgctgcctgatgcctctccccaggccttggacctgctgggccagttcctcctctaccctccacgacagcgtattgcagcctcccaggcccttctgcatcagtacttcttcacagcgcctctgcctgcccatccatccgagctgccaattcctcagcgcccagggggacctgcacccaaggctcacccagggcccccccatgtccacgacttccatgtggatcgacctattgaggagtcactgttgaacccagaactgattcggcccttcatcccagaggggtga

SEQ ID NO: 1682 - protein, 319 aa, Mus musculus
MDQYCILGRIGEGAHGIVFKAKHVETGEIVKKVRRLEDGIPNQALREIKALQEIEDSQYVVQLKAVFPHGAGFVLAFEFMLSDLAEVVRHAQRPLAPAQVKSYLQMLLKGVAFCHANNIVHRDLKPANLLISASGQLKIADFGLARVFSPDGGRLYTHQVATRAVGCIMGELLNGSPLFPGENDIEQLCCVLRILGTPSPRVWPEITELPDYNKISFKEQAPVPLEEVLPDDQALDLLGQFLLYPPRQRIAASQALLHQYFFTAPLPAHPSELPIPQRPGGPAPKAHPGPPHVHDFHVDRPIEESLLNPELIRPFIPEG

SEQ ID NO: 1683 - DNA, 1268 bp, Mus musculus
cgtggtgctatggccacgtcctggagcgttagattacgatagagtgactgccgaaggctgcggaaaggtgctgcctagaggggatgcagattcctgactgagctcagcactggtctttccggtcacgtgctttacggagcagctgctagacgcgttattgctaggcaacgcttgcaggagcctatgctggatccctgtagagtaggatctgggcgccgcgggccgacatggaccagtattgcatcctcggtcgcatcggggagggcgcccacggcatcgtcttcaaagccaagcacgtagagactggcgagatcgttgccctcaagaaggtggccttgcggcggctggaggatggtattcctaaccaggccctcagagaaatcaaggctctgcaggagatcgaggacagtcaatatgtggtgcagctgaaggctgtgttcccacatggtgcgggctttgtgctggctttcgaatttatgctgtcggacctggcagaggtggtgcgccatgcccagaggcccctggccccagcacaagtcaagagctacctgcagatgctgctcaaaggtgttgcgttttgccatgccaacaacattgtgcatcgggacctgaagcctgctaacctgctcatcagcgcctcaggccagctcaagatagctgactttggcctggcccgggtcttctctccggatggtggtcgcctctacacacatcaggtggccaccaggtggtaccgagctcctgaactcctgtatggcgctcggcagtatgaccagggcgttgacctatgggctgtgggctgcatcatgggagagctgttgaatgggtcccccctgttcccgggcgaaaacgacattgaacaactgtgctgtgtgcttcgcatcctgggtaccccgagtcctcgagtctggccggagatcacagagctgcctgactacaacaagatctccttcaaggagcaggcaccagtgcccctggaggaggtgctgcctgatgcctctccccaggccttggacctgctgggccagttcctcctctaccctccacgacagcgtattgcagcctcccaggcccttctgcatcagtacttcttcacagcgcctctgcctgcccatccatccgagctgccaattcctcagcgcccagggggacctgcacccaaggctcacccagggcccccccatgtccacgacttccatgtggatcgacctattgaggagtcactgttgaacccagaactgattcggcccttcatcccagaggggtga

SEQ ID NO: 1684 - protein, 340 aa, Mus musculus
MDQYCILGRIGEGAHGIVFKAKHVETGEIVKKVRRLEDGIPNQALREIKALQEIEDSQYVVQLKAVFPHGAGFVLAFEFMLSDLAEVVRHAQRPLAPAQVKSYLQMLLKGVAFCHANNIVHRDLKPANLLISASGQLKIADFGLARVFSPDGGRLYTHQVATRWYRAPELLYGARQYDQGVDLWAVGCIMGELLNGSPLFPGENDIEQLCCVLRILGTPSPRVWPEITELPDYNKISFKEQAPVPLEEVLPDDQALDLLGQFLLYPPRQRIAASQALLHQYFFTAPLPAHPSELPIPQRPGGPAPKAHPGPPHVHDFHVDRPIEESLLNPELIRPFIPEG

SEQ ID NO: 1685 - DNA, 28153 bp, Homo sapiens
gttgctgcaaatgacatgattttattctttttttatggctgttgggaaaagggcttgtggggtgcctgcataaactggccataaaaatatgggacaataagttgtggaaagccacaagaggcctctgaggaggaaagtcttctaattgccataacgttcccatgaccagagtgtgacctgctctcttatctataaacactgtgctcaaggagaaagacactcctttgaagcatcggaatgtggccagatatgccggctcctagttatgcccactcccgatagctgctctccaataagttaaagaataaatcagtagttaagtttatgctgcttcagcacaaagaaaatttacctaaaccgccattgctatagattaggtgtatgtcacaccgccccccgctttcaccgtttcacccctgaacatctgcttcttagatctaagtgactgtactcaataaatagtgtggagaccagagcttggcaccttcgcagcctctgatttgttctggccccctggctcccacctttatgaactcttaacctgtctcttctcattcctttgtcaccaccggactttgggtaccctacgggtggtgttggggttggtccccaacatatggctgagtagtattcctgtatatacacatacatatatgtgtgtgtgtgtgtataaaacattttctttattcaatcatcctttgatagacacctaggttgacttaggttgattccatatcttttctgctggaaatagtgctactacatacatacaaatgcaggtacctttttgatataatgatttcttttcctttaggtagatacccagtaatgggattactggattgaatggtagttctatttttaattctttgataaatctccatactgttttccatagaggttgtactaatttacattcccaccaacagtatataagcattcccttttctctgtatcctcgccaacatttttttttcttttttctttctttttttttttttttacaatttatttattttgagacagagtttcgctcttattgcccaggctggagtgcaatggcacgatctcgactcactgaaacctccgcctccgaggttcaagcgattctcctgcctcagcctccctagtaggtgggattacaggcatgtgccaccatgccaggctaattttgtatttttttagtagagacagggtttctccgtgttagtcaggctggtctcaaactcccgacctcaggtaatccacccgcctcggcctcccaaagtgctgggattacaggcgtgaaccactgtgcctggcctttgactttttattaataggcattctgactggtgtaagctgatatctcattttaattttcatttccctgatgagtagtgatgttgagaatattttcatatgcttgttggccatttgtatgtctttgtttgtcaaatgtctgttcatgttctttgactgcttttagtggggttatttggtttttgttgttgttgttaagatgtttgagttctttgcatattctggatattagtccgtcagatgcatagtttgcaaaatattttctcctattctgcaggttgttattcactgcgttatttttctgctgtgcagaaacattttagtttaattaagtctcatttgtctatttttgttattgctgtatttgcttttgaagtcttagccatgaattctttgcctagaccaatatctagaagaatttttcgtaggctttccttatgtatatttattttatacttcggttaataatgtactattatattttttattttcttggtcaaattgttctagctttggccattaggaattctttcagctggctcctgtgtctctataacatacccccatcacttctttttacaacttcttagtttttgtcactacttgttttcaaactatttatattgttatatttggaatgagttcgttgtagatggcttatggttgggtcatgttttctttagattcattctgtttggtgttcactcagcttcatgaatctccctttccgtatattgcttttttattctgttgtgtcctttgatgcacagaagcttttaattttgataaaatcaaatgtgtctattattattttaaaattttgattgacatatagtaattgtatgtatgtatggggtacataatgatgttttgacaggtacagtgtccaatacataatgtataaagatcagatagggtaattaccatatccattatctcaaatatttatcatttatttgtgttggaaacattcaatatcctccttctacttatttgaaactatatattattgttaactaatatatagtcataccacagtgctacagaacactagaacttattccttttatctaactagttgtaattttgtatcctttaacaaatctctcactatgtacccccccttctccactacaagtatgttctgttctactttttacttctctgagattaacttttcttggcttccacatgtgagaatatgtgatgtttcactttctgttcctggtttatttcacttaacatactatcctccagttccatctatgttgcagtgaatgacaggatttcattctctctgaggctgaataatattccattatatatatataccacattaaaaaattcattcatctattgttggacacctgggttgattccatatcttggctgttatgaatagtgctgtgctgcaataaacatggggatgaagatgtctcctcaacatactgatttcctttcctttggataaatatccagtagtgacagcactggatcttatggtagttctagttgcagttttgtgatgaatgtccatactgttctccacagtggctgtactaatttacgttttcatcaacagcatattagagttttcttttctccgcatccttgccaggatttgttattttagccatcctaactgggatgagattataccttattgtagttttgatttgcatttctgacaattagcatcattgagtactttttcatatgtttcttggccatttgtatgtcgtcttttgagaaatgtcttatctagatcatttgcccattcttaaactgaattgtcgtttttgttttgttttgactgttgagatgtttgagttccttgtgtattctggatattaatcccctgttggatgaatggcttgcagatattttctcagattctgcaggttgtctgttcactgtgttatttcttttgctgtgcataagctttttagtttgatataatcccatgtgtttatttttgcctttgtggctgtgtttttgaggtcttactcataaagtcttttcccagaccaatatcctgaagcacttcccctatgttttctactagtagttttatagttttttgtgttacttttaggtctttgatccattttgggttgatttttgtataaggtgagaggtggaggtctaatttcatttttctgcatatggatatccaattttcccagcactatttgttgaagacattgtcttttcctcagtaagtgttcttggtgcctttgtcaacaatcagtttgctatatatatgtggattaatttctgggttctctattctgttccattggcccacgtgtctgttttaaggtcagtactatgcagtttgtgttactacaactttgtagtagattttgaagtcaggtagtgtgatgccttcagtttcgttctttttgcataggattgctttggctattcagaatcttttgtgtctccacattgtttttaaatctttttttctatttctgtgaagaatgtcattggcattttgatagggattgcattgaatctgtagattgctttgggtagtatggtcatttttttttttttttttttttttttttttgagacagagtctcactctgtcacccaggctggagtgcaatggtgcaatctcggctcactgcaacctctgcctccctggttcaagctattctcctgcctcagcctcccgagtagctgggattagagctgcctgccaccgtgcccggctattttctgtatttttagtagagacagggtttcgcatgttggccaggctggtctcaaactcctgacctcagatgatccacctgcttcggcctcccaaagtgctgggattacaggtgtgagccaccatgcccggcacagtatggtcattttaacaatattaattcttgtactccatgagcatgggatgtctttccatttatttgtatactcttccatttcttttatcactgttttttagtttccttgtggaggtctttcacctccctggttggatttatacctaggtattttattattttttattttttgtagctattgtaaatgtgattgcctttctttttcagctagtttattgttcaaatataggaacactactgatacttatatgttgattttgtatcctaaaacttaactaaatttatcagttctaagagttttttggtagaacctttaggtttttccatatataagatcatgccatctgcaaatagggacaatttgactttctgctttccaattttgataccctttctttctcttgcctaattaccctggctattattacatttgttgcctatgtttttagtgttacatgaagaagtcactgtcaggccaggtgcggtggctcatgcctgtaatcccagcacgttgggaggccgaggcaggcaaatcatgaggtcaagagatcgagaccatcctggccaacatggtgaaaccctgtctctactaaaaatacaaaaattagttgggcgtggtggcatgcgcctgtagtcccaggtacttgggaggctgatacaggagaattgcttgaatctgggaggcagaggttgcagtgagccgagatcatgccattgtactccagcctggcaacagagtgagactgtgtcttaaaaaaaaaaaaagaagtcactgtcaaacccaatattatgaagcttttcccttatgtccttatgttctcctctaagagttttatagttttagctctttcatttaggttttcttttttttttttttttttgaaacagagcctccctctgttgcccacgctggagttcagtggcgtgacctcagctcactgcaacctccacctcctggtttcaagtgattctcctgcctcagcctcctgagtagctgggattacaggcatatgccccaatgcccagctcatttttttgtattttcagtagagacagggtttcaccatgttggccaggctggtctcgaactcctgacctcaagtgatccgcgggccttggcctcaagtgatcctgcctcagcctcccaaagtgctgagattacaggtgtaagccagtgcacctggtgtaaatttgggtctttaatccattttgagttagtttttccatatgatataaggggtcaattttttcattttcttgcatgtagagctctagctttctcaccatcattagttaaagagactgtcctttccccattgaatggtcttcataatttttttaaaaatcatttgatcaggtatgtgaagatttacttctaggctctccattctattccattgggctgtctgcctttatgtcagtaccacacttttttgattactatagcttgtggtaagctttaaaatctggacgagtaagacctcctccttttttaagattggttttggctatttagggcctcttgagaatccacattggtttctgaataattttttttttctaattctgcaaaaaagaaatcccatggagattccattaaacctttaaattgttttcagtagtattgacatattcaaaatattaagtccttcagtccatgaacacaagatgtctatttatttgtgtctttctttcagcaacattttttagttttcaacctatgagtcttttgcttccttatttactcctaagtattttattctttttgatattattgtaaatggaattattttcttaatttctgtttcagagtgctcattgttagtatatagaaactattgatttttgcatattgattttgaatcttgctactctgtttatcttgtttattagttttaacagttttttgtggcatatttaggattttctacatatattatcatgttgtctctagacagagatagttttttctttccaatttggatgctatttatttatttacctacattcatttatttatttattagacggagtctcactctgtcacccaggctggagtgcagtggtgcgatctcggctcactgcaacctccgcctcccgggttcaagcgattctcttgcctcagcctcccaagtagctgggactacaggtgcgtgccaccatgcccggctaatttttgtattttcagtagaaatggggtttcgccatgttggccaggctggtcttgaactcctgacctcaggtaatccacctgcctcagcctcccaaagtgctgggattacaggcatgagccgctgtgcccggcctatttatgtatttatttatttatttttctaattgctttggctaggacttccagtattatataaaataaaagcggcaaaagtgaggatccttgacttgttcttgatcttagagggaaagctttcaatctttcaccattgaatgtaatgttaactgtgggcttttcctgcatggcctgtattatgttgaggtggttttcttgtatttatagtttgttgagtgctttcttcattaaagagtgttgaattttgtcaaatgctttttctgcatcaattgagattatcgtctccttttaccatttcttgaagagaatagtgaaataactcccattaccataatcatactagtctttgtgctgtgatgttatgcacaaaatggtgcttcataaagcatttgataattgtacgacagtcttatgtgtgggaagataagtaaaatttagtcatgtaaaagtcattatgcagttattgatttggcaaaaaaaaaaaaaaaaagaaaaaaaagaaaaaagtcactagtccaataaaaaggcatttgctttgaaacttttcttgaacctcaaactagctagtaaaacttgacaaagtggagccgtgtgtggtggctcaggcctgtaagtccagtactctgggaggccaaagtgggaggatccctcaagcccaggatcagcctgggcaacatagagagaccctgcctctacaggcgtggtggtacgtgcctgtggaaaaaagtgccagtttttccaaggggttgtatgaacttgcactcttagcagcagtgtatgagagttcaagttgctctttgctagcatttggtattatctatctttttcatttaaactattctagtgattacaataacactctgttgtggttttaatatgaaattcccttctagtcagggaagttaaacacacatattgcaaaatttattggctgttcaggaatcaccttttgcgaagtgtctattccaggtttttctaattttttttttgtaagattgtctgcttcttcttcagtgttataataaaagttctctataaattctacatgtgagtcctttgtcagatatatgtattacagttctcttttgcctttctgtggctttcttgttcactctctaatggtatcttttttttttttttttaatttgagatggagtctcactctgtcacccaggcttgagtgcagtggcgtgatcttggttcacggcaacctccacctcctggattcaaacaactctcctgcctcagcctcctgagtagctgggatgacaggtgcatgccaccatgcctggctaatttttgtatttttagcagagacagggtttcaccatgttggccgggctggtcacgaactcctgacctcaactgattctcccatgttggcctcctaaagcgttgggattacaggtgtgagccactgtgcctggtctctaatggtatcttttgatgaatagatattcttagcattgatgaaggccaatttctcatttttgtttttcttttagtgtattctgtaacctaaggatcttgaattaatccaaagccattaagatataattttcttctaaaagcttcattatttaccttttatatttagattgcagtccatctggaatcaattttgtgaatggtgtgagactggggtcaatatacattattttccccttatgacttctcaaatgacccagcactatttgtgaagaccatcctttccctactgtatcttttttttttgtttgttttttttgagaccaagttttgctctgtcgcccagggtggagtgccttggcacaatctcggctcactgcaacctccgcctcctccattcaaacgattctcccgcgtcggcctcctgagtagctgggactacaggccgagtgccaccatgcccggctaatttttgtatttttcgtacaggcagggagtttcgccatgttggccaggctggtctcaaactcctgatctcaagtgatccgtaggactcggcctcccaaagtgctgggattacaggcctgagccaccatgcccagcctatcttcgccagttttaatgctaaaaactattccattctatggcactcccttaacttaacttagccatttttccatctgggtatttgggttgttttcagatctctgctatcatcaaacaggaggaatactttgtatggacatcaagtcattcttctgcaattattaacccagaagtgaaatttctaagctagaaaatatttgcttttttggaaaattaataaattatattcaaaactcaaataatgtaaagagacccagtgaaaagtctgcctcctattctgtccccctgtcctcccagtccctcttccaccaggtaaccacactcaggaaatcttgtgtatctttccagatatcttgtaatggatgtacaagcattatttatattcttttctccttttgtttacacagccagtggtactctatgcattctgtcctgcatcttgcctttttcatttaacaacctattttagaaatcttcccattgctgtacataaaaagatttaatacctcatttgaaggatgcaccacaatgatggacatctgtgttgtttccaatagtttgccgttgaaacaacgttgcaatggaataactttgtacatgtcatttcacatgtgtaaaaggtgtctattggggaaattgctagaagtggctttgctgagtctgagggtctgtgcatttgtgatttgatcaacatcgtcaaattatactgccaccagcaatgtatgaaagtgcttgttttcccgtagcttggtcaatgaactattagacctgagatctttagccatccaatatgtgaaaaactgtaactttagtttgcatttgtttattgtatgtgaagttgagcatcctttcagaagtttaaggcctactctgtcctgtctgggtcagagtatgcccttttattttatttttagttttagtttttgagacagagtctcgctctgtcacccaggctggagtacggtggcgcaatctcggctcactgtaacctctgcctcccgggttcaagcgattcttctgcctcagcctcctgagtagctgggattacaggagcacgccaccacgcccggctaatttttttgtattttcaatagagacggggtttcaccatgttggtcaggctggtctcgaactcctgacctgatgatccgcccgcctcagcctcccaaagcgctgggattacaggcgtgagccaccgtgcccggccctcagagtatgcccttttaaaaatctgtgggtacacgtagccaactgacattttaagacaagaggacccacagaccctctttccacaacgcagcccgggacctgtctgtctgcatcaatagtgcctggctttcggagctagaaaacagcacctgcgcgtggtcgaagcctgaacctctacttacaggtgcggagcttccggcttgccaggggaaggagcccgcccctcccggctgcgtgcaccagcgcagctagtcacgtgacgccgggggcgggggcagataggaggtgcctgctgtcatcgttccgtgggccctgctgcgggcacgctctcggcgcatgcgttttttatgcgggattaagcttgctgctgcgtgacagcggagggctaggaaaaggcgcagtggggcccggagctgtcacccctgactcgacgcagcttccgttctcctggtgacgtggcctacaggaaccgccccagtggtcagctgccgcgctgttgctaggcaacagcgtgcgagctcagatcagcgtggggtggaggagaagtggagtttggaagttcaggggcacaggggcacaggcccacgactgcagcgggatggaccagtactgcatcctgggccgcatcggggagggcgcccacggcatcgtcttcaaggccaagcacgtggaggtgaggctggaccgcggccggcagcctggcggggggtgtgccccccgcccccctccggctaacgctctaaactgtttcggttccctttttacatccagtacagtttttaaaacctactcatattctaaacctactttgggccgttgcgcttccctccgcacagctggcttggtcccctaccccagcggctgggtcccaggctagtcctagacccccgaggagggcctctggccgagccgggggcgcgtgtctctctctcaaccaccttcccctcacccaccttcatctctctttcccagccgagggtgggctggcagtgtctgccttctatcctgcagactggcgagatagttgccctcaagaaggtggccctaaggcggttggaagacggcttccctaaccaggccctgcgggagattaaggctctgcaggagatggaggacaatcagtatgtgagtaggggagggggggcatcgtattctcaccctcagtcgctcgttcccacttctttgtgccttcattttcccagctacgccttcaccagctttcagggatttcctcccgctgtcactcacacacactgctcattcatctgcctccttacccccttttgcccttttttgtccacttgttcacctttatttacctatttctttcatttctcacacattcactctcatttgcctacttatttcttaatgtattcattcattcaccgactttttttctcaaaacatgtagtgatttataatgtaactagcacctattgagctcccgatgtgttctgcaggcattatatacattgtcattttgagacctctttactactgtacaaggcaggtttccagatctctgtttctcaggtgagaggaggaggttatgtcaccagctcttgggccctccgttagtcagtagagggtttggcccaggtttgattgagagtccagacattcttcccttgggacctcccataggctctaccctgtgttgggcactggtgacacagagaaaccagctccagcccagctcctgaggacttaagtgtgctaacaagagacagaggcaacagggcccacctagtgtggttcgtgctgtgatagggtaccgggaggggctgctggaacacgaagaggggcatctttcacccctagtgtcattactcttttggtgctctctctcacccatgtcgaaatagggaatgtatttgactccctggagagttaacagggttgggtctctgtgatctggagatatgcatgatatattggatgacaaaagcatgttataaaattttgtgtcatctgggttttgtttggaaatattatatatgtgaatgtgtatttgtgtgtgccatatctgttgtaaagtctggtagaatacactctaagattgactgtaggatttttcttttgttctttttctgttggattttatgtcttacctgaatgtgtgcatgtgttttgatctgttaaatggttgtgtactacctgaaaaatccgaaaacagcaatcaggccattttgattttttgaggaagataaaagggcttccagacagccatgtgtgggataggtggagagatccataaggaagctggtgatatggtccctacatccagttggtcagcaattctgaaggttctaactttaaaacatactctagatttgctccttgcccaagtcatcatcaccactcatcagaatgacagtggcagcctccccactgctctccatagccacagtccggagggctttgtcaaaagtgtaagttaagtcatcggctcccctgcgtaaaaagccctggtggcttctcttcacacttagagcactatcaccatgtgcccacctccagctggcctctcccttttctctcattcaacacaacttcttaggcatctctccagtgaccagcacctatctagggtccaggagcacagaacaaggcagacacatccttcccttaaacaatctcatgtactcacatccctctagcctccttctgtgctggcgttagggccttgcacttgcttttcttcctgctcagagctttatcccagatccccacaaactgggtcctcatctagccccaccccacctaaataaagaagtatccttttctccactcacagaatcacactatcctcttctagttctgttgattttttttctttttttgatacagggtctcactctgtcacccaggctggagtgtagaagtgcgattttgtctccctgtagtctcaacctcctgggctcaggtgatcctcccacctcagcttcccaagtagctaggactacaggcacgtgtcaccatgcctggctagttttttgtattttttgtagagacaaggtttcaccatgttgcccaggctggtctcaaacacctgggttcaagccatccgcccaccttggcctctcaaagtactgggattacgggcatgagacgtcatgcccagcccccttgtattttggttcctgtacttacagaatctgaatatatcccttttattcatttatttgttaaactgtttgtcctttgtgctgtgagttcattaagagtcctgtctctcagctcactctctgtgtagcctggctcctctgacagtagtggcctcagtgtttgtgatgtgtctgtagctgtcccagcactgggaaaggtgggattcctggtgtcctttccttggtgctgggattcggtggttctagaggaaacaggaggagacctgtccatctcatgtgtgaccatccagatgattttcaggcgggtaggctgggtgggcggaccagatggtgccactaaatgaccttttttagaccttttagtgttcatggagaattagagtgggggcacaccttatctcaggagagcagagcaaatcatgagcatcgagctctctgattcttagctcaggtccacgtcaccttctttgcttactgtctttttggatacagggtcctctgtcagggcatgggctggggtctcagggtcacagagagggtctggtgacttgagtctgggggctaacaagatgtcctgcccacaggtggtacaactgaaggctgtgttcccacacggtggaggctttgtgctggcctttgagttcatgctgtcggatctggccgaggtggtgcgccatgcccagaggccactagcccaggcacaggtcaagagctacctgcagatgctgctcaagggtgtcgccttctgccatgccaacaacattgtacatcgggtcagtctcagcataggccgggcatggggtctggggagctgacttggcttggggatggggctagcccttgtaaaaggtgtgataagaagttgggacagagctggtcaaggcctccaggtaagtggccagggcatggccctggaggaggtggggaccggggctgacctgagtggttagactgccaagcccgcttgtcccaaggtcctatgggggatttggagggactgatgcttcttttggtactcccaggacctgaaacctgccaacctgctcatcagcgcctcaggccagctcaagatagcggactttggcctggctcgagtcttttccccagacggcagccgcctctacacacaccaggtggccaccaggtagggagggccagatcccttccagtcttctccatggggaagagatgcttctgggccttttctccagacattgcttgtggggctggggtcacctccccaggcatccttttctcagcccagtgcctgccagccctcttcctcgcaggtggtaccgagcccccgagctcctgtatggtgcccgccagtatgaccagggcgtcgatctgtggtgagacccctgtgggtggtcaaagggtaacatggctcatggatttctgctaggctctgaggtctctgagctgtttggtggtcttttccctggtgggagtttaggcttccttaagggtgtcttccctggttggggtattctgagcactttggggttggggttcctcactatgatgttttcgagctgggtaggggccaggtgggatgagaatggtggtcccaggtgggaagctttctgggctagatggggaggtggtctgagccgatatgtgctggagttagatcctaggatatggcatctctgagctggtcagaggcctgtgtccttggacatgaaagctctgagcttgttttgcagcaagaagatagttggcagtgcccatgggtctgagatttggggcaggtttgcaggtctgccccagaagtgtcctagagcaggagtctccgagaagtcttggaacagctggggctttgctctgggttctagggttgagggctttgagggttcagggactgggcctctggacgtgaggctccagggctggcttgtggggccttgccctggagtgcagtgttagagctgctctgtgggtgggtctgtggtccatggtgggagatctctgacctgcttggggctctgtgtccacaggtctgtgggctgcatcatgggggagctgttgaatgggtccccccttttcccgggcaagaacgatattgaacagctttgctatgtgcttcgcatcttgggcaccccaaaccctcaagtctggccggtttgtaggggcccttggtgaggtgggtgtggggcaggtttactccactcccaacagcaagtaaccactccctcccctgaaccttctctctcctggccccaaccccccttgatggacagggaccactgtcctggcccaactcagggcttcctccttcctgctgtcatttgggttggggtagatcctgtcctttgtcccttttcaccccagtacacacatgtgcagtgtctcagcaagctgtgcacagagtcgtcatctgagagggcaaggggatggatgaaggaatacaggggtgggtgagtgaatgaatgatgggtcagggagacacatggatgggagagcaccccccatgtgagtgtgtgttaggggctgagagttgacagcagagagcatggcaagggtcgggaactactctcattgtaccctgttccttctccctggcccaggagctcactgagctgccggactacaacaagatctcctttaaggagcaggtgcccatgcccctggaggaggtgctgcctgacgtctctccccaggcattggatctgctgggtcaattccttctctaccctcctcaccagcgcatcgcagcttccaaggtagggggagaggctgtagtctctgctccttcagctcccctccccatcaccctggtactctgtacttggtagccatgtgaccccatcacatcagcgaccctcagaacctgtgattggcatggaccagcaccagacatctggaacccaggggacaggggccttggagcaggtgtgcctctcatgagtagaccccactggacatccccagacttcccctgagggtggcccatacgaggggcatgcccaactctcaggagagcgcgtgtccgggagtgcaggtttctgggctgcccctgaccctgtggcagatacagtaagagagtcactggggactcattcctttattccattagcaagtattttctgcacatctggcacatgcagggattgtcctgggccctgcacagatggtaaacaatcagtcctacctccgcggggcactcctggtggtgaggtagctccaggtccaaaaggtcacaagaggtcatgttctccagctgtgggagccccaggagagaggcaaggccgactttggggtcaagcaaagcttcctggtggagggcaggtttaagcatgagatgtttgagaaggtgttcgctgaagagagaaatggtgggcagaggcctggaagagaggacccaggaaggctggttatggctggtaggcctgggaggacgatgaccacaggagcatgggctgacaggtgtcagggtgtctctcaggggtccctgtcccctccctgcactcagcaccagccgcgtgtgtttacatacgccctcttggtctccactgtcagcagctcctgtgggctctgtgtccacagtgtacccaagccgtgtgacccttatctcttgggttgcctcccagaatctgggtctcccctcatcccatttaatctcttctccacctggcagacagagtaactttatccaagtagaacaggacacattccttctctgccagggccctcctgtggctccatctcagaggaaaagccagggtcctttttgtgacccacagatgtcgtatgcttgggtgccatcacctcatgatgctgcctgctgttgtgccctgtgctcactcctctccagccccaggggtcagtacacttttgtccctggcctggagcctcatgtcccacttgcttatgtctcaagtcttggcttaaatgtcacttctcagatggccttccctcatgactcttcagatctgcaacctctctccaggattcctcattcctctgtcttgctttctctcttccactgcactaatcattatctgacatactgtgtattttacttcatcttgtttattaccccccaccctcacttatgtcagaaaaacagagcttttgtctgttttattaacggctatgttcccagcttctggaatagtgcttcagacatagtagacactcagaaaacacccagacacactgagtcagctgaatgcatagatgaaggaacatctgcttgaggctggggacagggaggtgactagtttccttctgctgttccttacttgccaccctcaggctctcctccatcagtacttcttcacagctcccctgcctgcccatccatctgagctgccgattcctcagcgtctagggggacctgcccccaaggcccatccagggcccccccacatccatgacttccacgtggaccggcctcttgaggagtcgctgttgaacccagagctgattcggcccttcatcctggaggggtgagaagttggccctggtcccgtctgcctgctcctcaggaccactcagtccacctgttcctctgccacctgcctggcttcaccctccaaggcctccccatggccacagtgggcccacaccacaccctgccccttagcccttgcgagggttggtctcgaggcagaggtcatgttcccagccaagagtatgagaacatccagtcgagcagaggagattcatggcctgtgctcggtgagccttaccttctgtgtgctactgacgtacccatcaggacagtgagctctgctgccagtcaaggcctgcatatgcagaatgacgatgcctgccttggtgctgcttccccgagtgctgcctcctggtcaaggagaagtgcagagagtaaggtgtccttatgttggaaactcaagtggaaggaagatttggtttggttttattctcagagccattaaacactagttcagtatgtgagatatagattctaaaaacctcaggtggctctgccttatgtctgttcctccttcatttctctcaagggaaatggctaaggtggcattgtctcatggctctcgtttttggggtcatggggagggtagcaccaggcatagccacttttgccctgagggactcctgtgtgcttcacatcactgagcactcatttagaagtgagggagacagaagtctaggcccagggatggctccagttggggatccagcaggagaccctctgcacatgaggctggtttaccaacatctactccctcaggatgagcgtgagccagaagcagctgtgtatttaaggaaacaagcgttcctggaattaatttataaatttaataaatcccaatataatcccagctagtgctttttccttattataatttgataaggtgattataaaagatacatggaaggaagtggaaccagatgcagaagaggaaatgatggaaggacttatggtatcagataccaatatttaaaagtttgtataataataaagagtatgattgtggttcaaggataaaaacagactagagaaacttattcttagccatcctttatttttattttatttattttttgatggagtcttgctctgttgcccaggctggagtgcagtggcacaatctcggcttactgcaacctccgcctcctgggttcaagtgattctcctgcctcagcttcccgagtagctgggactacaggcgcgtgccaccacacctggctaatttttgtatttttactcaagacagggtttcaccatgttagccaggatggtcttgatctcctgacctcgtgatctgcctgcccgggcctctcaaagtgctgggattgtaggcgtgagccaccatgcccagccccaggctccctttatttttaaaatgtttattttatgcttcatgtggataaactcttctgtgagcactcagggtgactaacactgctacagatgctggccttcaagcacttagtggagagagaaaacatactcaaccctcgttcttggctttcaggaaagtctgatgttttcatgatatggcctctgtttatttctccagccacatcttctgcagactgtaagcttctaagagaacttcaaagagaactctaaaatgtatataacatttgcaagtaaaaggagaaaaaatgatttatcgtgcatacacaaaccaaaaatctggtgtagttatttgatatcaaataacagaggccgggtgcagtggctcatgcctgtaatcccaacactttgggaggccaaagtgggcagatcacccgaggttgggagttcgagaccaccctggccaccatggtgaaatcccatctctaataaaaatacaaaaattagccgggtgtgatggtgcatgcctgtaatcccagctacttgggagactgaggcaggagaatcgcttaaacctgggagacagaggttgcagtgagccgagatcgtgccactgcactccagccttggtgacagacttgtctcaaaaaaaaaaaaaaaaaaagaaaatagattttaaggcaaagagctgttatttaatataagatacaatttcaaggcaaaaatcattactagtgataaacacattcagttctaattatattcagttcattggtaaaatttttcaaatttgtacgtacctaatctcaaatattatcaatattagaaatgaataggattcaaaagactaaggatattagaagtaactttatacatgcgaaattttggtaaaattgacaaatccatagaaaaattcgacttgcaataataaaaaacaaacccctgaagtgtcttaaaactgttaaaaaggaattgaacctccaaattaaaatattttcattatgtaatctccaggcccagatagcttcactactaaattctaccagtcaatcacttaataaatggacagtgtcacgattccagagaatacaggagaaagcttactcagcttattttgtgacaccagcagtagtcttgatactaaaattcaacaaggacattagaaaaatgaaaattatataatgattcttgtgttacctttcaaaaataaaggaaaaatcagccgggtgtgatggctcatgcctgtaatctcaacactttgggaggccgaggtgggaggactgcttaagtccaggagtttgagaccagcttcggcaatacggcaagaccccatctctacaaaaaaaattagccaggtgtggtggcatgcgcctgtagtgccagctacatgagaggctgaggtaggaggatcgcttaagacagcagtgagctgtgatcacaccactgcactcagcttgggtgacgaagagtgagaccatgcctccccataaggggtagcccccacaaaacaggagtgtggtcctccctgacccttgcctggccaggctcttcccaaggctgaggcccctagtggcatgagggtctccaaagagcctggggccacaggccttgctctgggagccccaggagctcagggtctggccagcctgtccccagcccaggacagaccaccagttgtttggtggttactgcaatggaattcagtcccaaacctccccatagaccctgacgtcagggcccctggttcccacagtactgcttcgggcaggaatgctgggcccccatcccttcagcatctgccctggctacctcccggaccatggacagactggccctgcaaccccactggggcccatcatcaacccctgcctagctttctgaagatccacaggaagagccgaagacacctccccttcacagtggcccatgtcctatccctgtcagtttcactgacctgcatgttctggaaggagccaggacagcagcctaccccgcaagctgcccagaagccccggatggcccctcagccagctgaaaccaccgtccactgggaagatggctacttggaggcctctggaggggagggggtgtggcatcctcatagctctggccagccagcaggatgtcttgtgtcctcatgctgacctcctgtgggacagaactccctaacacggcacaaggtccagatccagaggggtttgatctggcctcaacccgagcctggggcccccagcagccaaggtgatcaccaaagggactgagccacctgtagctctgaccagtactagaatctagcccaaggtagggcgagccctctcagagcagtgcatggctacttgggacctgtgcaaaccccaaaaggccaagtcagtgaccttagggggcctgaatagcaaccagtcaccttggcgatgaggctgcaggagtaggcaggccagccaccaccctcattcatacaaggaggcagggatggccaggctccaggacctgagtggtcacctggtcacccatgagaaagagccctgaggccaagcgtggtgctgggccctcctgctccaggtggtaggactggaggaaactgggcaggcctgggcccaggagactgcgtccctctatctgccatccttggcaggtcacggtccccaaaactcatgaaatgtggccttactcaaagcaaggaggcttcaaggtggggaccagagtccccagtctgggttcaccattcaaagcttccctcctggggacaagggatgctcccctggcctcatgcccacccctccccaccccccacatattggttaaaagacgataaattgtttatcattatgactcatctgttcttggggcacccagagttgtctgcaagaagcatcagacaccctggaacaggtgagagaagagggtggcacagcccatgctgcctgacctgcctcccccttgcaaaggctatagtagggcctagggccatacagagccaaggctcccatatacttcatgtaagaccatcaggaggcctcaggaaatctgaagcggggaggtcaaaattctctgattgcccactcaaatgtcctaatcccacatctcagggtcttgctctttccctatctgggcctgactttttaaaattgccatcgaccatgaggctgcttcccttccgcaagccaaacaaaccacctacaaccatgctcctgccaagatgtacaagagaggttatactagaacctaaggaacaagggggtcccaaattggatgatctctgggaaacccgtggggcagttacagttcttactagggtcagattatggtatctccttcaagccatccccgccttctgtgcctgcccctgatctccaccagtggcaggtacccaccctacacagggatttggtgattgtggaatcaggttcccctgaaagacaatcaccctattccattaactgtggtttgggttccaaaaaataaacaccacagcctggctctgttggatgtggatgctcaaatctccctaacccaggaagcactcatgctttaaagggacacttcaaggaggtgacaggcttggaaggaagattaataagccacttaactattaaagttagtccctagggccgggcatggtgtctcacgcctgtaatcccaacactttgggaggccgaggtgggtgaatcacctgaggtcaggagtttgagaccagcctggccaacgtggcaaaaccttgtctctactaaaaatacaaaaattagctaggtgtggtggcgtgtgcctgtaatcccagctactcagatgaggcaggagaattgcttgaacctgggaggcagaggttgcagtgagctgagattgtgccactgcattccagcctaggcaacagagcaagactccgtctctaaataaataaataaataaagttagttccattttgctaagaaatacttctctcttgttcccactactgaatggacctcctcagtcagcagcaacaagcctaagacttttacactattggtgggtgggttccctgtgggaatcggtcagccttcctctatccagttgaggtggtagatacaccactgtgctgcctaagacaagacactgaagggtgccagcctgtcgggactgacttgggtaagaagggatgctgattcctaccatctcacctttcagttcctttaagcctgtgcttaaagctgttactgatgactggacttattatagatgatacaaagctaaacaatgctgttctcttcattacagcatctctaccaaatattgtcaccttaatggatgacattcaaaacaacatgggtaaatggtttagagttactgcacagacttggctaacaggttttattcactaaaattttttcatgacagccaaccacaatttgacttaacctttgagagtcaacagcacagctttacctgactgcctgcactgtggtgaaaggcctttacttacatctggactttgctaagaggaccccgatgcttgccccacacttcccccaagaaacttagctttggcatcatatcagtgacatcctcctcactggtcctgaccaaaactttgtttcacaggtcatcacagctgtgagcaagcaccccactgaggggatggacagttgccccacataaggtgcaagacccctcctgacctgttaaagtgttgggctacacctagaactcagagaggtaaactattcccaatttggcaaaagagaatctcctagctctccaacctcccacatcaataaagggattcaatcaacactgggattctggcaccaatacatcccttcctcccatatttcttcgtatccagtcacccacaaattttctgctttttagttatcaaaattgaagcccttactagggcagagcccatttaccctatgaaccaagattcctattatgccctgggtaatggaaaaagcttactgtaaaactggatcagcaacagaaaccttcttactacaatggaaatggtatttacagaatcaactcacatttagtcctactggagtgtaacattccatgagaaaatagccacataccctgccactgaggtcaacttgccaaaatcctgaaaatgcctctgcctcttgcttagtggggactggagggaggatggtcagcaatctcaaaacaagagaaccaatggcctctcattactgatgagggagcacagggcataaggaattcagaccaaggagagctacagcctttaaccccattcagacactcattccatatgtgcattactcctagcaatagatacgccattttcccaaggtttctatcttcatgaactcttggttaatggctaatgagctaactacttggttgggactttggcaatatcagagctggaaaatacaaggccaagatattcagggtaaaaagatgtagggaaaataatcattatgagacagtataggaaagagacttggtctttgtagaccgaggctcatggggctcacatgtccaggcatattccctcccctaccttcttgcctcccttaacaagctgacctaagtcacatagcagaagggaagcctctcctaacttagctgatcaggctgaattcttaaccacaaatagaagaaactgtttattgccttaagtgatgtctcccaaggttgctaaaagccggactctagcattcctgataagaacctgaccatattccaagtttactaaaacaaaactctggcattccctatgagaattggaccagatccagttggctgaagacaagatggacttcagcactgacctttcactgagttttcctcataatctcactgtaatacgaaaatctctgcccaaattggggcttatctaccattttctaattatgcaatgtatgttagggcatgacaccccactgtacaggcacaaagaaaactgcctaaacaggcttctgacagagcaggaacatcaccatcttggacaagcaccaccattttaaaattccccttgatcagaaaccacctaaatccaaagggcatcagctaaggtcagcatgaccataaatcacaaatgacatctccaaccagaaacattccaacccctaagataaacccctccccaaccagacacatgccagccccgagataacctcccctccagctggagacattccaaaccccgcaataaacttctcctccacacagaaacattccaagcctgtgataagctatcttgccctaaaacacttaaatactcttagtctgtaagagagagtgctcctgactgaaatcggccagaaacccctctcaggttcattctccaaaataaacctgtctttgactgttgagccactttttgtgtttctttcctctttctttaactctcacagcttctatgtcattcctttctctgcctcagcttccttaaaatgacaagagctgagccctttttggctgtagcactggggtccttttcctgggcactgctcccttgctttgattgagctcaagcccattaaaacttgcctgagaaaaattactgtttggcctggtattaatttgtatttactcgagagccaagatgctgcactaacacttacagtggctcccattctgcctaccttgatgcaccgtaccttggctcataccagacaagacatggaagaggcatgacacaacaccaaagctgatgaactaaccatagcataccagcagataagcctcttgaaggaggcagagtcctagagctttgggatgagctaccctatcccatgcaagggcatgtaagaggagaggtcagggcatttgggcatcatggggttacaaaaatgaattattattttttatttttctttgagatggagtcttgcagtgtcacctaggctgaagtgcagtggtgcaatatcggctcactgcaacctctgcctcctgggttgaagcaattcttgtgcctcagcctgccaagtagctgggactacaggcacgtgccaccacacctggctaattttagtatttttagtagagacgagggtttcaccatgttgcccaggctggtctagaactcctgacctcaagtgatccacccgcctctgcctcccaaagtgctgggattacaggcgtgagtcaccatgcccggtcaaaaaggaattattaacagaggagtcaacccagcagagacacatttatgcaaggttattagggactgtaccatgctagaaatttagatactgggttcactgcctgggaggagaaattcacaggaaggccattatcagaactggcaaatcaacttcaaagggcctccccctacagtgacaggagccaatgaatatgctaagggatatctacacaggccatccatttgcttacccatgtgaggcaggaacctctactaatgtcacaatgggttaccaaaacagcttttacagcctttgggtgtgccacaagttacacagtcagatcaaggctcttcttgtaccacaaagcaaatgcaacgatgggtattacaaagtaacattacaaagtaacagcagtgggtatcatagaaagatataatgagcttttaaaacgggggctactgaaacgatgtagatgacaatggtgacctgagtcatcaaaatgctgcctctagccagggatggtggctcacgcctgtaatactggcgctttgggaggcaaggtgggtggattgcttgagctcatgagttcaagacctgcctgggcaacatgatgaaacctcgtctctagtaaacatacaaaaattaggcatggtggcatgaggtctagttactcaggaggcttaggtgggaggatggcttgagcccaggaggcagaggttgcactgagctgagattgcaccactgtactccagcctgggtgacagagcgtgaccctgtctcaaaaaacaaaaacaaaaaaagccaagatggtgtcccaagtcctaattacattatatgaactctgcaccccctagggcataactacacaatatttaaattcacaaccaatgagggactatcaacaagaaaggctgcgacctctgcccgtgaccacactggccacaacgtaattacagttttcaggtacacagaagcactgatatggctgcacatggccaagaaaccactcgacacttttaccttccccttctccctcatagaaaacccacagcctaaccacatcccccttgatcctgccgcccacatacatataatacatatgtgtgtgtatacacatgtatatatgtatctattcatggtgtgtgtgtgtgtgtgtaaaggagaggctgggccgggcacagtggctcacgcctgtaatcccagcattttgggaggccgaggtgggcagatcatgaggtcaggagatccagaccaccctggctaatgcagtgaaaccctgtctctactaaaaatacaaaaaaattaggcaggcatggtggcacgtgcctgtaatctcagctactcgggatgctgaggcaggagaatcacttgaacccaggaggcagaggtgcagtgagctgagattgcaccactgcactccggcctgggcgacagagcaagactccgtctcaaaaaaaaaaaaaaaaaaaaatgaggccactaagatattttgtacttgaattacaagtatatttaaacatgagggtggtagatacgtcatggttaagtaggaatatacaagcctctagtcgccttggtgtgtgcattctgattgttagattttttttctctaggatgctgcaaacacatttcaaagtataaccatggagttatagtatcaaagaacttaagattgaaagggcctgtggacattatctagtctgactctcatattatagcctcagaaaaaaatgaatgcctacgaatggaaacggatttgcctagcaatcctggaaagagctgggaacagaacttgacctctattacacagtaataaaaatattaatggaaacaacagtcatcacaagagctagtaccattttaggggtggctgcaatatgccctatatatatgttatcttatttaatccttaaaaacaatattttaatataggtattatcctcatgttgaatttaaaaaatgagtttttaagtctaggaacatacaactaatacatgggaaaacctacatttaaattgagttttcttatagatacaaaattccatgtatttcccactattattttcaccttaattttaatatttattattatttactcatgctattaaaactgtagaaaataattgaaaatgatatcaatgagaagagaacaggattaaggcaaatataatatgtatttcatgatcagtatctgaaagatctctaaaatagctaagctttattcttgcctccaggagaatctgtaagaaaataacacgtgcactgcatattaccacctcaagttgtaaagaaatagaatcagctgggaaaaaaatcagcgcattattctctcttttgtaggaggttttgtttattattttagaggcagtccatttgtgtcctcaattatctagtccttttttttcttttttggcttgtcccagtagcca

SEQ ID NO: 1686 - DNA, 2140 bp, Homo sapiens
tgcctgctgtcatcgttccgtgggccctgctgcgggcacgctctcggcgcatgcgttttttatgcgggattaagcttgctgctgcgtgacagcggagggctaggaaaaggcgcagtggggcccggagctgtcacccctgactcgacgcagcttccgttctcctggtgacgtggcctacaggaaccgccccagtggtcagctgccgcgctgttgctaggcaacagcgtgcgagctcagatcagcgtggggtggaggagaagtggagtttggaagttcaggggcacaggggcacaggcccacgactgcagcgggatggaccagtactgcatcctgggccgcatcggggagggcgcccacggcatcgtcttcaaggccaagcacgtggagactggcgagatagttgccctcaagaaggtggccctaaggcggttggaagacggcttccctaaccaggccctgcgggagattaaggctctgcaggagatggaggacaatcagtatgtggtacaactgaaggctgtgttcccacacggtggaggctttgtgctggcctttgagttcatgctgtcggatctggccgaggtggtgcgccatgcccagaggccactagcccaggcacaggtcaagagctacctgcagatgctgctcaagggtgtcgccttctgccatgccaacaacattgtacatcgggacctgaaacctgccaacctgctcatcagcgcctcaggccagctcaagatagcggactttggcctggctcgagtcttttccccagacggcagccgcctctacacacaccaggtggccaccaggtctgtgggctgcatcatgggggagctgttgaatgggtccccccttttcccgggcaagaacgatattgaacagctttgctatgtgcttcgcatcttgggcaccccaaaccctcaagtctggccggagctcactgagctgccggactacaacaagatctcctttaaggagcaggtgcccatgcccctggaggaggtgctgcctgacgtctctccccaggcattggatctgctgggtcaattccttctctaccctcctcaccagcgcatcgcagcttccaaggctctcctccatcagtacttcttcacagctcccctgcctgcccatccatctgagctgccgattcctcagcgtctagggggacctgcccccaaggcccatccagggcccccccacatccatgacttccacgtggaccggcctcttgaggagtcgctgttgaacccagagctgattcggcccttcatcctggaggggtgagaagttggccctggtcccgtctgcctgctcctcaggaccactcagtccacctgttcctctgccacctgcctggcttcaccctccaaggcctccccatggccacagtgggcccacaccacaccctgccccttagcccttgcgagggttggtctcgaggcagaggtcatgttcccagccaagagtatgagaacatccagtcgagcagaggagattcatggcctgtgctcggtgagccttaccttctgtgtgctactgacgtacccatcaggacagtgagctctgctgccagtcaaggcctgcatatgcagaatgacgatgcctgccttggtgctgcttccccgagtgctgcctcctggtcaaggagaagtgcagagagtaaggtgtccttatgttggaaactcaagtggaaggaagatttggtttggttttattctcagagccattaaacactagttcagtatgtgagatatagattctaaaaacctcaggtggctctgccttatgtctgttcctccttcatttctctcaagggaaatggctaaggtggcattgtctcatggctctcgtttttggggtcatggggagggtagcaccaggcatagccacttttgccctgagggactcctgtgtgcttcacatcactgagcactcatttagaagtgagggagacagaagtctaggcccagggatggctccagttggggatccagcaggagaccctctgcacatgaggctggtttaccaacatctactccctcaggatgagcgtgagccagaagcagctgtgtatttaaggaaacaagcgttcctggaattaatttataaatttaataaatcccaatataatccc

SEQ ID NO: 1687 - protein, 319 aa, Homo sapiens
MDQYCILGRIGEGAHGIVFKAKHVETGEIVKKVRRLEDGFPNQALREIKALQEMEDNQYVVQLKAVFPHGGGFVLAFEFMLSDLAEVVRHAQRPLAQAQVKSYLQMLLKGVAFCHANNIVHRDLKPANLLISASGQLKIADFGLARVFSPDGSRLYTHQVATRSVGCIMGELLNGSPLFPGKNDIEQLCYVLRILGTPNPQVWPELTELPDYNKISFKEQVPMPLEEVLPDVSPQALDLLGQFLLYPPHQRIAASKALLHQYFFTAPLPAHPSELPIPQRLGGPAPKAHPGPPHIHDFHVDRPLEESLLNPELIRPFIG

SEQ ID NO: 1688 - DNA, 2129 bp, Homo sapiens
tgcctgctgtcatcgttccgtgggccctgctgcgggcacgctctcggcgcatgcgttttttatgcgggattaagcttgctgctgcgtgacagcggagggctaggaaaaggcgcagtggggcccggagctgtcacccctgactcgacgcagcttccgttctcctggtgacgtggcctacaggaaccgccccagtggtcagctgccgcgctgttgctaggcaacagcgtgcgagctcagatcagcgtggggtggaggagaagtggagtttggaagttcaggggcacaggggcacaggcccacgactgcagcgggatggaccagtactgcatcctgggccgcatcggggagggcgcccacggcatcgtcttcaaggccaagcacgtggagactggcgagatagttgccctcaagaaggtggccctaaggcggttggaagacggcttccctaaccaggccctgcgggagattaaggctctgcaggagatggaggacaatcagtatgtggtacaactgaaggctgtgttcccacacggtggaggctttgtgctggcctttgagttcatgctgtcggatctggccgaggtggtgcgccatgcccagaggccactagcccaggcacaggtcaagagctacctgcagatgctgctcaagggtgtcgccttctgccatgccaacaacattgtacatcgggacctgaaacctgccaacctgctcatcagcgcctcaggccagctcaagatagcggactttggcctggctcgagtcttttccccagacggcagccgcctctacacacaccaggtctgtgggctgcatcatgggggagctgttgaatgggtccccccttttcccgggcaagaacgatattgaacagctttgctatgtgcttcgcatcttgggcaccccaaaccctcaagtctggccggagctcactgagctgccggactacaacaagatctcctttaaggagcaggtgcccatgcccctggaggaggtgctgcctgacgtctctccccaggcattggatctgctgggtcaattccttctctaccctcctcaccagcgcatcgcagcttccaaggctctcctccatcagtacttcttcacagctcccctgcctgcccatccatctgagctgccgattcctcagcgtctagggggacctgcccccaaggcccatccagggcccccccacatccatgacttccacgtggaccggcctcttgaggagtcgctgttgaacccagagctgattcggcccttcatcctggaggggtgagaagttggccctggtcccgtctgcctgctcctcaggaccactcagtccacctgttcctctgccacctgcctggcttcaccctccaaggcctccccatggccacagtgggcccacaccacaccctgccccttagcccttgcgagggttggtctcgaggcagaggtcatgttcccagccaagagtatgagaacatccagtcgagcagaggagattcatggcctgtgctcggtgagccttaccttctgtgtgctactgacgtacccatcaggacagtgagctctgctgccagtcaaggcctgcatatgcagaatgacgatgcctgccttggtgctgcttccccgagtgctgcctcctggtcaaggagaagtgcagagagtaaggtgtccttatgttggaaactcaagtggaaggaagatttggtttggttttattctcagagccattaaacactagttcagtatgtgagatatagattctaaaaacctcaggtggctctgccttatgtctgttcctccttcatttctctcaagggaaatggctaaggtggcattgtctcatggctctcgtttttggggtcatggggagggtagcaccaggcatagccacttttgccctgagggactcctgtgtgcttcacatcactgagcactcatttagaagtgagggagacagaagtctaggcccagggatggctccagttggggatccagcaggagaccctctgcacatgaggctggtttaccaacatctactccctcaggatgagcgtgagccagaagcagctgtgtatttaaggaaacaagcgttcctggaattaatttataaatttaataaatcccaatataatccc

SEQ ID NO: 1689 - protein, 181 aa, Homo sapiens
MDQYCILGRIGEGAHGIVFKAKHVETGEIVKKVRRLEDGFPNQALREIKALQEMEDNQYVVQLKAVFPHGGGFVLAFEFMLSDLAEVVRHAQRPLAQAQVKSYLQMLLKGVAFCHANNIVHRDLKPANLLISASGQLKIADFGLARVFSPDGSRLYTHQVCGLHHGGAVEWVPPFPGQERY

SEQ ID NO: 1690 - DNA, 2040 bp, Homo sapiens
tgcctgctgtcatcgttccgtgggccctgctgcgggcacgctctcggcgcatgcgttttttatgcgggattaagcttgctgctgcgtgacagcggagggctaggaaaaggcgcagtggggcccggagctgtcacccctgactcgacgcagcttccgttctcctggtgacgtggcctacaggaaccgccccagtggtcagctgccgcgctgttgctaggcaacagcgtgcgagctcagatcagcgtggggtggaggagaagtggagtttggaagttcaggggcacaggggcacaggcccacgactgcagcgggatggaccagtactgcatcctgggccgcatcggggagggcgcccacggcatcgtcttcaaggccaagcacgtggagactggcgagatagttgccctcaagaaggtggccctaaggcggttggaagacggcttccctaaccaggccctgcgggagattaaggctctgcaggagatggaggacaatcagtatgtggtacaactgaaggctgtgttcccacacggtggaggctttgtgctggcctttgagttcatgctgtcggatctggccgaggtggtgcgccatgcccagaggccactagcccaggcacaggtcaagagctacctgcagatgctgctcaagggtgtcgccttctgccatgccaacaacattgtacatcgggacctgaaacctgccaacctgctcatcagcgcctcaggccagctcaagatagcggactttggcctggctcgagtcttttccccagacggcagccgcctctacacacaccaggtggccaccaggtctgtgggctgcatcatgggggagctgttgaatgggtccccccttttcccgggcaagaacgatattgaacagctttgctatgtgcttcgcatcttgggcaccccaaaccctcaagtctggccggagctcactgagctgccggactacaacaagatctcctttaaggagcaggtgcccatgcccctggaggaggtgctgcctgacgtctctccccaggcattggatctgctgggtcaattccttctctaccctcctcaccagcgcatcgcagcttccaagctcccctgcctgcccatccatctgagctgccgattcctcagcgtctagggggacctgcccccaaggcccatccagggcccccccacatccatgacttccacgtggaccggcctcttgaggagtcgctgttgaacccagagctgattcggcccttcatcctggaggggtgagaagttggccctggtcccgtctgcctgctcctcaggaccactcagtccacctgttcctctgccacctgcctggcttcaccctccaaggcctccccatggccacagtgggcccacaccacaccctgccccttagcccttgcgagggttggtctcgaggcagaggtcatgttcccagccaagagtatgagaacatccagtcgagcagaggagattcatggcctgtgctcggtgagccttaccttctgtgtgctactgacgtacccatcaggacagtgagctctgctgccagtcaaggcctgcatatgcagaatgacgatgcctgccttggtgctgcttccccgagtgctgcctcctggtcaaggagaagtgcagagagtaaggtgtccttatgttggaaactcaagtggaaggaagatttggtttggttttattctcagagccattaaacactagttcagtatgtgagatatagattctaaaaacctcaggtggctctgccttatgtctgttcctccttcatttctctcaagggaaatggctaaggtggcattgtctcatggctctcgtttttggggtcatggggagggtagcaccaggcatagccacttttgccctgagggactcctgtgtgcttcacatcactgagcactcatttagaagtgagggagacagaagtctaggcccagggatggctccagttggggatccagcaggagaccctctgcacatgaggctggtttaccaacatctactccctcaggatgagcgtgagccagaa

SEQ ID NO: 1691 - protein, 271 aa, Homo sapiens
MDQYCILGRIGEGAHGIVFKAKHVETGEIVKKVRRLEDGFPNQALREIKALQEMEDNQYVVQLKAVFPHGGGFVLAFEFMLSDLAEVVRHAQRPLAQAQVKSYLQMLLKGVAFCHANNIVHRDLKPANLLISASGQLKIADFGLARVFSPDGSRLYTHQVATRSVGCIMGELLNGSPLFPGKNDIEQLCYVLRILGTPNPQVWPELTELPDYNKISFKEQVPMPLEEVLPDVSPQALDLLGQFLLYPPHQRIAASKLPCLPIHLSCRFLSV
